(19) United States
(12) Patent Application Publication
(10) Pub. No.: US 2017/0058278 A1
(43) Pub. Date: Mar. 2, 2017

(54) COMPOSITIONS AND METHODS OF USING SAME FOR CONTROLLING PATHOGENICALLY INFECTED MOSQUITOES

(71) Applicant: Forrest Innovations Ltd., Caesarea (IL)

(72) Inventors: Nitzan PALDI, Moshav Bar Giora (IL); Humberto Freire BONCRISTIANI JUNIOR, Odenton, MD (US); Eyal MAORI, Rishon-LeZion (IL); Avital WEISS, Karkur (IL); Emerson Soares BERNARDES, Sao Paulo (BR)

(21) Appl. No.: 15/307,858

(22) PCT Filed: May 4, 2015
(86) PCT No.: PCT/IL2015/050464

§ 371 Date: Oct. 31, 2016

Related U.S. Application Data
(60) Provisional application No. 61/988,234, filed on May 4, 2014.
(60) Provisional application No. 61/988,235, filed on May 4, 2014.
(60) Provisional application No. 61/988,237, filed on May 4, 2014.
(60) Provisional application No. 61/988,236, filed on May 4, 2014.
(60) Provisional application No. 61/988,246, filed on May 4, 2014.

(51) Int. Cl. C12N 15/113; A01N 25/10; A01N 25/02; A01N 57/16; A01N 25/00

(52) U.S. Cl. CPC C12N 15/113; A01N 57/16; C12N 15/1138; A01N 25/006; A01N 25/02; A01N 25/10; C12N 2310/14; C12N 2320/35; C12N 2320/30

(57) ABSTRACT

A method of controlling a pathogenically infected mosquito is disclosed. The method comprising administering to a larva of a mosquito an isolated nucleic acid agent comprising a nucleic acid sequence which specifically downregulates an expression of at least one mosquito pathogen resistance gene product of the mosquito, wherein downregulation of the expression of the at least one mosquito pathogen resistance gene in the larvae renders an adult stage of the mosquito lethally susceptible to the pathogen, thereby controlling the pathogenically infected mosquito.

### FIELD AND BACKGROUND OF THE INVENTION

[0001] The present invention, in some embodiments thereof, relates to isolated nucleic acid agents, and, more particularly, but not exclusively, to the use of same for controlling pathogenically infected mosquitoes.

[0002] Mosquitoes Harbor, Replicate and Transmit Human Pathogenic Viruses

[0003] Insects are among the most diverse and numerous animals on earth and populate almost every habitat. As agricultural pests, they cause severe economic losses by damaging and killing crops, but insects also pose an important threat to human and animal health. Insects are vectors for numerous pathogens, including viruses, bacteria, protozoa and nematodes.

[0004] Over 500 arthropod-borne viruses (arboviruses) have been identified, among which approximately 100 are harmful to humans. Arboviruses cause some of the most serious and feared human infectious diseases, such as hemorrhagic fevers and encephalitides, yet their infections of arthropod vectors, which are essential links in their transmission cycles, are almost always nonpathogenic and persistent for the life of the mosquito or tick. However, there is evidence that some parasites manipulate the behavior of their vectors to enhance pathogen transmission. For example, the malaria mosquito Anopheles gambiae, infected with transmissible sporozoite stages of the human malaria parasite Plasmodium falciparum, takes larger and more frequent blood meals than uninfected mosquitoes or those infected with non-transmissible oocyst forms. This parasite-mediated manipulation of behavior in An. gambiae is likely to facilitate parasite transmission.

[0005] The suite of factors that allow an arthropod that has encountered a pathogen to become infected and to transmit a particular pathogen once it encounters a susceptible host is defined as the arthropod's vector competence for that pathogen.

[0006] The process of vector infection begins when the pathogen enters the mosquito within a blood meal containing sufficient numbers of the pathogen to ensure some will encounter the epithelium where the blood has been deposited in the arthropod's midgut. The pathogen must be able to cross the epithelium that has been termed the midgut infection barrier (MIB). Once in the epithelium the pathogen must replicate, cross the epithelium and escape the midgut into the hemocoel in a process termed the midgut escape barrier (MEB). The pathogen then must replicate in various mosquito tissues but ultimately some sufficient quantity of the pathogen must invade the mosquito's salivary glands in a process overcoming the salivary gland infection barrier (SIB). There the pathogen replicates and ultimately must escape the salivary gland in the process described as the salivary gland escape barrier (SEB) upon subsequent blood feeding when it is injected into a susceptible animal host to complete the transmission cycle. This entire process can take several days to complete in the mosquito during a period called the extrinsic incubation period (EIP). Along the way there are other arthropod related factors including various barriers to the pathogen that may also influence the pathogen and the arthropod's vector competence. The pathogen encounters arthropod digestive enzymes and digestive processes, intracellular processes and the arthropod's immune system.

[0007] Some Mosquitoes are Naturally Able to Restrict Virus Replication by Mounting a Strong Host Defense Response to Viral Infection

[0008] Horizontal arbovirus infection of the vector is established upon blood-feeding of a susceptible female mosquito on a viremic vertebrate host. Within the insect vector, arboviruses have a complex life cycle that includes replication in the midgut, followed by systemic dissemination via the hemolymph and replication in the salivary glands. Transmission of an arbovirus to a naive vertebrate host during blood-feeding requires high viral titers in the saliva. Anatomical and immunological barriers affect the ability of the virus to reach such titers and thus to accomplish successful transmission to a naive host.

[0009] Despite efficient replication, arboviruses do not cause pathology suggesting that the insect immune system restricts virus infection to non-pathogenic levels. Innate immunity provides the first line of defense against microbial invaders and is defined by its rapid activation following pathogen recognition by germline-encoded receptors. These receptors recognize small molecular motifs that are conserved among classes of microbes, but are absent from the host, such as bacterial cell wall components and viral double-stranded (ds) RNA. Collectively, these motifs are called pathogen-associated molecular patterns (PAMP).

[0010] When exposed to arboviruses, mosquitoes respond with anti-microbial immune pathways like Janus kinase-signal transducer and activator of transcription (JAK/STAT) and Toll pathways, immune deficiency (IMD) and RNA interference (RNAi) machinery.

[0011] RNAi is one of the molecular mechanisms for regulation of gene expression generally known as RNA silencing. It has a central role in insect antiviral immunity. It appears to require minimal transcriptional induction, although its activation might induce upregulation of other antiviral genes. Notably, the RNAi response inhibits virus replication without causing death of the infected cell.

[0012] Thus, for example, RNAi can eliminate Dengue virus (DENV2) from transgenic mosquitoes expressing an inverted-repeat RNA to trigger the RNAi pathway against the virus. However, arboviruses are able to persistently infect vectors despite being targeted by the RNAi machinery as shown by the presence of 21 nt virus-derived small interfering RNAs (viRNAs) in arbovirus-infected, transmission-competent mosquito vectors [Scott et al. (2010) PLOS Negl Trop Dis 4: e848; Hess et al. (2011) BMC Microbiol 11: 45].

[0013] A number of insect pathogenic viruses express a virus-encoded protein suppressor of RNAi (VSR) during replication. Expression of VSRs in insect virus-infected cells results in enhanced virus production, but in most cases these are virulence factors that greatly increase the pathogenicity of the viral infection. For example, temporally induced silencing of the RNAi machinery in Ae. aegypti led to significantly increased SINV (sindbis virus) and DENV2 (Dengue virus) titres combined with increased midgut infection and dissemination rates and a shortened extrinsic incubation period [Campbell et al. (2008) BMC Microbiol 8: 47; Sanchez-Vargas et al. (2009) PLOS Pathog 5: e1000299; Khoo et al. (2010) BMC Microbiol 10: 130].

[0014] One of the most widely studied and potent insect virus VSRs is the B2 protein encoded by Flock House virus (FHV; Nodaviridae). The B2 protein is a homodimer and indiscriminately binds to double-stranded RNA (dsRNA) molecules independent of their nucleotide sequences and sizes such as siRNAs duplexes and long dsRNAs, thereby protecting dsRNA from being accessed and processed by dicer2 of the RNAi machinery. A recombinant SINV strain was engineered to express the FHV B2 protein. When mosquitoes were orally infected with SINV-B2, virus titres, midgut infection and escape rates were significantly increased compared to the control virus. Strikingly, SINV-B2 caused high mortality amongst the mosquitoes at 4-6 days post-infection suggesting that RNAi has the potential to protect the vector from pathogenic effects of replicating arboviruses [Myles et al. (2008) Proc Natl Acad Sci USA 105: 19938-19943; Cirimotich et al. (2009) BMC Microbiol 9: 49].

[0015] Furthermore, constitutive over-expression of B2 in PUbB2 P61 mosquitoes suppressed the RNAi pathway in the mosquitoes. Two unrelated arboviruses, SINV-TR339eGFP and DENV2-QR94, responded similarly to RNAi suppression in midgut tissue of PUbB2 P61 mosquitoes by producing significantly increased mean virus titres at 7 days pbm [Khoo et al. (2013) Insect Mol Biol. 22(1): 104-14].

[0016] Externally Delivered dsRNA can be Effective in Gene Regulation and Provide Phenotypic Effects in Adult and Larvae in Mosquitoes

[0017] In studies involving insects, administration (e.g. by direct injections) of in vitro-synthesized dsRNA into virtually any developmental stage can produce loss-of-function mutants [Bettencourt et al. (2002) Insect Molecular Biology 11:267-271; Amdam et al. (2003) BMC Biotechnology 3: 1; Tomoyasu and Denell (2004) Development Genes and Evolution 214: 575-578; Singh et al. (2013) J Insect Sci. 13: 69].

[0018] Studies on feeding dsRNA revealed effective gene knockdown effects in many insects, including insects of the orders Hemiptera, Coleoptera, and Lepidoptera. Feeding dsRNA to E. postvittana larvae has been shown to inhibit the expression of the carboxylesterase gene EposCXE1 in the larval midgut and also inhibit the expression of the pheromone-binding protein EposPBP1 in adult antennae [Turner et al. (2006) Insect Molecular Biology 15: 383-391]. The feeding of dsRNA also inhibited the expression of the nitrophorin 2 (NP2) gene in the salivary gland of R. prolixus, leading to a shortened coagulation time of plasma [Araujo et al. (2006) Insect Biochemistry and Molecular Biology 36: 683-693].

[0019] Direct spray of dsRNA on newly hatched Ostrinia furnalalis larvae has been reported by Wang et al. [Wang et al. (2011) PloS One 6: e18644]. The studies have shown that after spraying dsRNAs (50 ng/μL) of the DS10 and DS28 genes (i.e. chymotrypsin-like serine protease C3 (DS10) and an unknown protein (DS28), respectively) on the newly hatched larvae placed on the filter paper, the larval mortalities were around 40-50%, whereas, after dsRNAs of ten genes were sprayed on the larvae along with artificial diet, the mortalities were significantly higher to the extent of 73-100%. It was proposed through these results that in a lepidopteron insect, dsRNAs are able to penetrate the integument and could retread larval developmental ultimately leading to death [Katoch (2013) Appl Biochem Biotechnol., 171(4): 847-73].

[0020] In mosquitoes, RNAi method using chitosan/dsRNA self-assembled nanoparticles to mediate gene silencing through larval feeding in the African malaria mosquito (Anopheles gambiae) was shown [Zhang et al. (2010) Insect Molecular Biology (2010) 19(5): 683-693]. Oral-delivery of dsRNAs to larvae of the yellow fever mosquito, Ae. aegypti was also shown to be insecticidal. It was found that a relatively brief soaking in dsRNA, without the use of transfection reagents or dsRNA carriers, was sufficient to induce RNAi, and can either stunt growth or kill mosquito larvae [Singh et al. (2013), supra]. Furthermore, dsRNA targeting RNAi pathway genes were described to increase Dengue virus (DENV) replication in the Ae. Aegypti mosquito and to decrease the extrinsic incubation period required for virus transmission [Sanchez-Vargas et al. (2009), supra]. The authors describe targeting the sequence of the gene AAEL011753 (r2d2) by 76-575, which is one of the proteins of the silencing complex.

[0021] One method of introducing dsRNA to the larvae is by dehydration. Specifically, larvae are dehydrated in a NaCl solution and then rehydrated in water containing double-stranded RNA. This process is suggested to induce gene silencing in mosquito larvae.

[0022] A recently published RNA seq analysis describing mosquito transcriptional profiles during DENV infection show that all transcripts representing immunity-related genes with differential accumulation in midgut samples were always more abundant in control than DENV mosquitoes, supporting the conclusion that there is a suppression of the insect immune system following infection. This result may reflect the general ‘DENV downregulation trend” observed. A similar pattern was seen in carcass samples at early time points postinfection, but the opposite was observed at 14 days post infection (dpi), reflecting a possible change in immune modulation during the course of the infection [Bonizzoni et al. (2012) PLoS ONE 7(11): e50512].

[0023] U.S. Patent Application Nos. 20030154508 and 20030140371 provide pesticidal compositions that contain one or more compounds that interact with organic solute transporter/ligand-gated ion channel multifunction polypeptides (e.g. CAATCH protein) in the pest (e.g. mosquito), and/or alter amino acid metabolic pathways, and/or alter ionic homeostasis in the pest (e.g. mosquito). Upon exposure to a target pest, these compositions either compromise pest growth and/or cause the death of the pest. The compositions of U.S. 20030154508 and 20030140371 may contain one or more amino acids and/or amino acid analogs, or alternatively may comprise antibodies, antisense polynucleotides or RNAi.

[0024] U.S. Patent Application No. 20090285784 provides dsRNA as insect control agents. Specifically, U.S. 20090285784 provides methods for controlling insect infestation via RNAi-mediated gene silencing, whereby the intact insect cell(s) are contacted with a double-stranded RNA from outside the insect cell(s) and whereby the double-stranded RNA is taken up by the intact insect cell(s). U.S. Patent Application No. 20090010888 provides the use of cytochrome P450 reductase (CPR) as an insecticidal target. Specifically, U.S. 20090010888 provides methods of pest treatment (e.g. mosquitoes) comprising administering an agent (e.g. dsRNA) which is effective in reducing an activity and/or expression of the pest's CPR.

[0025] U.S. Patent Application No. 20130011372 provides inactivated microorganisms containing dsRNA molecules capable of inhibiting the functionality of a GPCR receptor and their use as pesticides.

[0026] U.S. Patent Application No. 20130137747 provides dsRNA RNA based nanoparticles for insect gene silencing. According to the teachings of U.S. 20130137747 the nanoparticles are orally ingested by the target insect (e.g. mosquito) and trigger gene silencing of a target gene such as insect chitin synthase gene (CHS1 and/or CHS2).

[0027] U.S. Patent Application No. 20100011654 provides RNAi for the control of insects and arachnids. U.S. 20100011654 provides dsRNA formulations matching a part of an essential insect gene (e.g. structural proteins, metabolic enzymes, enzymes involved in ion/pH homeostasis and enzymes involved in the transcriptional/translational machinery), causing downregulation of the insect target via RNA interference (RNAi), and consequently causing death, growth arrest or sterility of the insect and/or arachnid.

### SUMMARY OF THE INVENTION

[0028] According to an aspect of some embodiments of the present invention there is provided a method of controlling a pathogenically infected mosquito, the method comprising administering to a larva of a mosquito an isolated nucleic acid agent comprising a nucleic acid sequence which specifically downregulates an expression of at least one mosquito pathogen resistance gene product of the mosquito, wherein downregulation of the expression of the at least one mosquito pathogen resistance gene in the larvae renders an adult stage of the mosquito lethally susceptible to the pathogen, thereby controlling the pathogenically infected mosquito.

[0029] According to some embodiments of the invention, the mosquito comprises a female mosquito being capable of transmitting a disease to a mammalian organism.

[0030] According to some embodiments of the invention, the mosquito is of a species selected from the group consisting of Aedes aegypti, Aedes albopictus and Anopheles gambiae.

[0031] According to some embodiments of the invention, the administering comprises feeding, spraying or soaking.

[0032] According to some embodiments of the invention, the administering comprises soaking the larva with the isolated nucleic acid agent for about 12-48 hours.

[0033] According to some embodiments of the invention, the larva comprises third instar larva.

[0034] According to some embodiments of the invention, the method further comprises feeding the larva with the isolated nucleic acid agent until the larva reaches pupa stage.

[0035] According to some embodiments of the invention, the pathogenically infected mosquito carries an infection selected from the group consisting of a viral infection, a nematode infection, a protozoa infection and a bacterial infection.

[0036] According to some embodiments of the invention, the viral infection is caused by an arbovirus.

[0037] According to some embodiments of the invention, the arbovirus is selected from the group consisting of an alphavirus, a flavivirus, a bunyavirus and an orbivirus.

[0038] According to some embodiments of the invention, the arbovirus is selected from the group consisting of a La Crosse encephalitis virus, an Eastern equine encephalitis virus, a Japanese encephalitis virus, a Western equine encephalitis virus, a St. Louis encephalitis virus, a Tick-borne encephalitis virus, a Ross River virus, a Venezuelan equine encephalitis virus, a Chikungunya virus, a West Nile virus, a Dengue virus, a Yellow fever virus, a Bluetongue disease virus, a Sindbis Virus and a Rift Valley Fever virus a Colorado tick fever virus, a Murray Valley encephalitis virus, an Oropouche virus and a Flock House virus.

[0039] According to some embodiments of the invention, the protozoa infection is caused by a Plasmodium.

[0040] According to some embodiments of the invention, the protozoa infection causes malaria.

[0041] According to some embodiments of the invention, the nematode infection is caused by a Heartworm (Dirofilaria immitis) or a Wuchereria bancrofti.

[0042] According to some embodiments of the invention, the nematode infection causes Heartworm Disease.

[0043] According to an aspect of some embodiments of the present invention there is provided a mosquito larva-ingestible compound comprising an isolated nucleic acid agent comprising a nucleic acid sequence which specifically downregulates an expression of at least one mosquito pathogen resistance gene product in a mosquito and a microorganism or algae on which mosquito larva feed.

[0044] According to some embodiments of the invention, the mosquito larva-ingestible compound of some embodiments of the invention is formulated as a solution.

[0045] According to some embodiments of the invention, the mosquito larva-ingestible compound of some embodiments of the invention is formulated in a solid or semi-solid formulation.

[0046] According to some embodiments of the invention, the semi-solid formulation comprises an agarose.

[0047] According to some embodiments of the invention, the microorganism is selected from the group consisting of a bacteria and a water surface microorganism.

[0048] According to some embodiments of the invention, the mosquito pathogen resistance gene is selected from the group consisting of a RNA interference related gene, a piRNA pathway related gene, an immunity related gene, a metabolism related gene, a cytoskeleton related gene, a cell membrane related gene, a cell motility related gene, an extracellular structure related gene, a post-translational modification related gene, a protein turnover related gene, a chaperone related gene, a signal transduction related gene, a proteolysis related gene, an oxidoreductase activity related gene, a transcription related gene, a translation related gene, a diverse related gene, a transport related gene, a cell-cycle related gene, an energy production and conversion related gene, a chromatin structure and dynamics related gene, a Toll related gene and a JAK/STAT related gene.

[0049] According to some embodiments of the invention, the mosquito pathogen resistance gene is selected from the group consisting of AAEL003673 [histone H4], AAEL003689 [histone H4], AAEL003669 [histone H2], AAEL002610 [serine protease], AAEL005004, AAEL011455 [CTLMA12], AAEL007599, AAEL007585 [cathepsin B], AAEL017536 [holotricin], AAEL003603, AAEL007669, AAEL001702, AAEL017571, AAEL015312 [cathepsin B], AAEL012216 [cathepsin B], AAEL008418 [pyrroline-5-carboxylate reductase]), AAEL013857, AAEL000335 [lamin], AAEL003211, AAEL003950 [helicase], AAEL002422 [cytoplasmic polyadenylation element binding protein], AAEL015328, AAEL000652 [GNBPA2], AAEL009178 [GNBPB4], AAEL007064 [GNBPB6], AAEL003253 [CLIPB13B], AAEL001929 [SPZ5], AAEL011608 [PGRPLD], AAEL007696 [REL1A], AAEL015515 [CECG], AAEL004522 [GAM], AAEL015404 [LYSC], AAEL012471 [DOME], AAEL012553 [HOP], AAEL009692 [STAT], AAEL006949 [SOCS16D], AAEL006936 [SOCS16D], AAEL000255 [SOCS44A], AAEL000393 [SOCS], AAEL015099 [SUMO], AAEL011753 (r2d2), AAEL006794 (dcr2), AAEL017251 (ago2), AAEL007823 (Ago3), AAEL013235 (Spn-E), AAEL007698 (AuB), AAEL000709 (Cactus), AAEL007768 (MyD88), AAEL003832, AAEL007562, AAEL000598 and AAEL010179.

[0050] According to some embodiments of the invention, the mosquito pathogen resistance gene is selected from the group consisting of AAEL007768 (MyD88), AAEL000709 (Cactus), AAEL007698 (AuB), AAEL003832, AAEL007562, Rel1A (AAEL007696), AAEL000598 and AAEL010179.

[0051] According to an aspect of some embodiments of the present invention there is provided an isolated nucleic acid agent comprising a polynucleotide expressing a nucleic acid sequence which specifically downregulates an expression of at least one mosquito pathogen resistance gene selected from the group consisting of AAEL003673 [histone H4], AAEL003689 [histone H4], AAEL003669 [histone H2], AAEL002610 [serine protease], AAEL005004, AAEL011455 [CTLMA12], AAEL007599, AAEL007585 [cathepsin B], AAEL017536 [holotricin], AAEL003603, AAEL007669, AAEL001702, AAEL017571, AAEL015312 [cathepsin B], AAEL012216 [cathepsin B], AAEL008418 [pyrroline-5-carboxylate reductase]), AAEL013857, AAEL000335 [lamin], AAEL003211, AAEL003950 [helicase], AAEL002422 [cytoplasmic polyadenylation element binding protein], AAEL015328, AAEL000652 [GNBPA2], AAEL009178 [GNBPB4], AAEL007064 [GNBPB6], AAEL003253 [CLIPB13B], AAEL001929 [SPZ5], AAEL011608 [PGRPLD], AAEL007696 [REL1A], AAEL015515 [CECG], AAEL004522 [GAM], AAEL015404 [LYSC], AAEL012471 [DOME], AAEL012553 [HOP], AAEL009692 [STAT], AAEL006949 [SOCS16D], AAEL006936 [SOCS16D], AAEL000255 [SOCS44A], AAEL000393 [SOCS], AAEL015099 [SUMO], AAEL011753 (r2d2), AAEL006794 (dcr2), AAEL017251 (ago2), AAEL007823 (Ago3), AAEL013235 (Spn-E), AAEL007698 (AuB), AAEL000709 (Cactus), AAEL007768 (MyD88), AAEL003832, AAEL007562, AAEL010179 and AAEL000598.

[0052] According to an aspect of some embodiments of the present invention there is provided an isolated nucleic acid agent comprising a polynucleotide expressing a nucleic acid sequence which specifically downregulates an expression of at least one mosquito pathogen resistance gene selected from the group consisting of AAEL007768 (MyD88), AAEL000709 (Cactus), AAEL007698 (AuB), AAEL003832, AAEL007562, Rel1A (AAEL007696), AAEL010179 and AAEL000598.

[0053] According to an aspect of some embodiments of the present invention there is provided a nucleic acid construct comprising a nucleic acid sequence encoding the isolated nucleic acid agent of some embodiments of the invention.

[0054] According to an aspect of some embodiments of the present invention there is provided a cell comprising the isolated nucleic acid agent or the nucleic acid construct of some embodiments of the invention.

[0055] According to some embodiments of the invention, the cell is selected from the group consisting of a bacterial cell and a cell of a water surface microorganism.

[0056] According to an aspect of some embodiments of the present invention there is provided a mosquito larva-ingestible compound comprising the cell of some embodiments of the invention.

[0057] According to some embodiments of the invention, the nucleic acid agent is a dsRNA.

[0058] According to some embodiments of the invention, the dsRNA is a naked dsRNA.

[0059] According to some embodiments of the invention, the dsRNA comprises a carrier.

[0060] According to some embodiments of the invention, the carrier comprises a polyethyleneimine (PEI).

[0061] According to some embodiments of the invention, the dsRNA is effected at a dose of 0.001-1 μg/μL for soaking or at a dose of 1 pg to 10 μg/larvae for feeding.

[0062] According to some embodiments of the invention, the dsRNA is selected from the group consisting of SEQ ID NOs: 1315-1324 and 1330.

[0063] According to some embodiments of the invention, the dsRNA is selected from the group consisting of siRNA, shRNA and miRNA.

[0064] According to some embodiments of the invention, the nucleic acid sequence is greater than 15 base pairs in length.

[0065] According to some embodiments of the invention, the nucleic acid sequence is 19 to 25 base pairs in length.

[0066] According to some embodiments of the invention, the nucleic acid sequence is 30-100 base pairs in length.

[0067] According to some embodiments of the invention, the nucleic acid sequence is 100-800 base pairs in length.

[0068] Unless otherwise defined, all technical and/or scientific terms used herein have the same meaning as commonly understood by one of ordinary skill in the art to which the invention pertains. Although methods and materials similar or equivalent to those described herein can be used in the practice or testing of embodiments of the invention, exemplary methods and/or materials are described below. In case of conflict, the patent specification, including definitions, will control. In addition, the materials, methods, and examples are illustrative only and are not intended to be necessarily limiting.

### BRIEF DESCRIPTION OF THE SEVERAL VIEWS OF THE DRAWINGS

[0069] Some embodiments of the invention are herein described, by way of example only, with reference to the accompanying drawings. With specific reference now to the drawings in detail, it is stressed that the particulars shown are by way of example and for purposes of illustrative discussion of embodiments of the invention. In this regard, the description taken with the drawings makes apparent to those skilled in the art how embodiments of the invention may be practiced.

[0070] In the drawings:

[0071] FIG. 1 is a schematic illustration of the regulation of putative Toll signaling pathway genes by dengue virus infection. Red color indicates infection responsive up-regulation and green color indicate infection responsive downregulation. Non-colored gene boxes indicate lack of infection responsive regulation.

[0072] FIG. 2 is a schematic illustration of the JAK/STAT signaling cascade. The core JAK-STAT pathway factors identified in Drosophila and their putative roles in the cascade are shown.

[0073] FIGS. 3A-D are schematic illustrations of mosquito immune signaling and RNAi pathways. FIG. 3A, in Toll pathway signaling, detection of pathogen-derived ligands by pattern recognition receptors (PRRs) triggers signaling through the adaptor protein MyD88, resulting in degradation of Cactus, which in turn leads to activation of transcription of Toll-pathway regulated genes. FIG. 3B, the IMD pathway is activated by ligand binding to PGRP-LCs and -LEs. This binding triggers signaling through IMD and various caspases and kinases, leading to a functional split in the pathway. Both pathway branches lead to an activated form of Rel2 which translocates to the nucleus and activate IMD-regulated transcription. FIG. 3C, the JAK-STAT pathway is triggered by Unpaired (Upd) binding to the receptor Dome, activating the receptor-associated Hop Janus kinases, which results in dimerization of phosphorylated-STAT and its translocation to the nucleus to activate JAK-STAT-regulated transcription. FIG. 3D, the exogenous siRNA pathway is activated when virus-derived long dsRNA is recognized, cleaved by Dcr2 into siRNAs and loaded onto the multi-protein RISC complex, where it is degradated. Sensing of viral dsRNA by Dcr2 also activates TRAF, leading to Rel2 cleavage and activation via a distinct pathway. Rel2 activates transcription of Vago, a secreted peptide which subsequently triggers JAK-STAT pathway signaling. Incorporated from Sim et al., Viruses 2014, 6, 4479-4504.

[0074] FIG. 4 is a flowchart illustration depicting introduction of dsRNA into mosquito larvae. In short, third instar larvae were treated (in groups of 100 larvae) in a final volume of 3 mL of dsRNA solution in autoclaved water (0.1 to 0.2 μg/μL, depending on the target. See Table 4B). The control group was kept in 3 ml sterile water only. After soaking in the dsRNA solutions for 24 hr at 27° C., the larvae were transferred into a new container (300 larvae/1500 mL of chlorine-free tap water), and were provided with both agarose cubes containing 300 μg of dsRNA once a day (for a total of two days) and 6 mg/100 mL lab dog/cat diet (Purina Mills) suspended in water. As pupae developed, they were transferred to individual vials to await eclosion and sex sorting, followed by feeding with virus infected blood.

[0075] FIGS. 5A-B are graphs illustrating the comparison of two methods of in vivo infection with Flock house virus. FIG. 5A, supernatants from FHV-infected S2-Drosophila cells were diluted with defibrinated sheep blood and exposed to adult females of Aedes aegypti through a pork gut membrane on a water-jacketed membrane feeder for 20 minutes. Control mosquitoes were fed uninfected blood. At the indicated timepoints postinfection, 5-7 individual mosquitoes were collected and analyzed for FHV viral load by qPCR. FIG. 5B, supernatants from FHV-infected S2-Drosophila cells were diluted (v/v) in a 10%-solution of sugar, and the mixture were adsorved in filter paper. The filters were exposed to Ae. aegypti females for 20 minutes. Control mosquitoes were exposed to sugar only. The viral loads were determined as described in FIG. 5A. Of note, FIGS. 5A and 5B show the typical profile of FHV infection in mosquitoes.

[0076] FIGS. 6A-B are graphs illustrating the relative expression of MyD88 and Rel1A gene in Ae. aegypti mosquitoes infected with Flock house virus. Females Ae. aegypti mosquitoes were infected with a mixture of defibrinated sheep blood and supernatants from FHV-infected S2-Drosophila for 20 minutes. Control mosquitoes were fed with uninfected blood. At the indicated timepoints postinfection, 5-7 individual mosquitoes were collected and analyzed for the mRNA levels of MyD88 and Rel1A by qPCR. Data represents the mean plus standard deviation of the 5-7 mosquitoes analyzed individually. *p<0.05; ***p<0.001; ****p<0.00001; in Sidak's multiple comparisons test.

[0077] FIGS. 7A-E are graphs illustrating that feeding larvae with different dsRNAs increases the viral load of Flock house virus by adult Ae. aegypti mosquitoes. Larvae from A. aegypti RJ strain (3^{th} instar) were soaked for 24 hours with the indicated dsRNA (0.1 to 0.2 μg/μL) or only in water. After soaking in the dsRNA solutions for 24 hr at 27° C., the larvae were transferred into a new container (300 larvae/1500 mL of chlorine-free tap water), and were provided with agarose cubes containing 300 μg of dsRNA once a day (for a total of two days) and then reared until adult stage. Unfed three to five-day-old females were exposed to a mixture of defibrinated sheep blood and supernatants from FHV-infected S2-Drosophila for 20 minutes. At two hours after the exposure of mosquitoes to FHV, individual mosquitoes were collected and analyzed for viral loads by qPCR method. The dots and squares represent individual mosquitoes and the mean among them. *p<0.01; **p<0.001 (Student t test).

[0078] FIG. 8 is a table showing the mortality rate of dsRNA-treated mosquitoes and water control group at 15 days postinfection. Of note, the high mortality rate of Rel1A and cactus-treated mosquitoes.

[0079] FIGS. 9A-C are graphs illustrating that feeding larvae with MyD88 dsRNA increases viral load of Flock house virus and susceptibility by adult A. aegypti mosquitoes. Larvae from A. aegypti RJ strain (3^{th} instar) were soaked for 24 hours in 0.2 μg/mL of MYD88 dsRNA or only in water. After soaking in the dsRNA solutions for 24 hr at 27° C., the larvae were transferred into a new container (300 larvae/1500 mL of chlorine-free tap water), and were provided with agarose cubes containing 300 μg of dsRNA once a day (for a total of two days) and then larvae were reared until adult stage. Unfed three to five-day-old females were exposed to a mixture of defibrinated sheep blood and supernatants from FHV-infected S2-Drosophila for 20 minutes. At two hours after the exposure of mosquitoes to FHV, individual mosquitoes were collected and analyzed for viral loads by qPCR method using primers specifically designed for FHV RNA-1, and normalized by the mosquito endogenous control tubulin. (FIG. 9A) Number of infected mosquitoes after 2 hours, 7 days and 15 days postinfection with Flock house virus (treatment with dsRNA MyD88). (FIG. 9B) Individual mosquitoes were collected and analyzed for viral loads by qPCR, using primers specifically designed for FHV RNA-1 (FIG. 9C) or for MyD88 mRNA expression by qPCR. **p<0.001 (Two-way Anova followed by Sidak's test).

[0080] FIGS. 10A-C are graphs illustrating that feeding REL1A dsRNA to larvae affects the susceptibility of adult A. aegypti mosquitoes to Flock house virus infection. Larvae from A. aegypti RJ strain (3^{th} instar) were soaked for 24 hours in 0.1 μg/mL REL1A dsRNA or only in water. After soaking in the dsRNA solutions for 24 hours at 27° C., the larvae were transferred into a new container (300 larvae/1500 mL of chlorine-free tap water), and were provided with agarose cubes containing 300 μg of dsRNA once a day (for a total of two days) and then larvae were reared until adult stage. Unfed three to five-day-old females were exposed to a mixture of defibrinated sheep blood and supernatants from FHV-infected S2-Drosophila for 20 minutes. At two hours, 7 days and 15 days after the exposure of mosquitoes to FHV, individual mosquitoes (live and dead) were collected and analyzed for viral loads and mRNA expression level by qPCR, using primers specifically designed for FHV RNA-1, and normalized by the mosquito endogenous control tubulin. (FIG. 10A) Number of infected mosquitoes after 2 hours, 7 days and 15 days postinfection with Flock house virus (treatment with dsRNA REL1A). (FIG. 10B) Individual mosquitoes were collected and analyzed for viral loads by qPCR, using primers specifically designed for FHV RNA-1 (FIG. 10C) or for REL1A mRNA expression by qPCR. ****p<0.0001 (Two-way Anova followed by Sidak's test).

### DESCRIPTION OF SPECIFIC EMBODIMENTS OF THE INVENTION

[0081] The present invention, in some embodiments thereof, relates to isolated nucleic acid agents, and, more particularly, but not exclusively, to the use of same for controlling pathogenically infected mosquitoes.

[0082] The principles and operation of the present invention may be better understood with reference to the drawings and accompanying descriptions.

[0083] Before explaining at least one embodiment of the invention in detail, it is to be understood that the invention is not necessarily limited in its application to the details set forth in the following description or exemplified by the Examples. The invention is capable of other embodiments or of being practiced or carried out in various ways. Also, it is to be understood that the phraseology and terminology employed herein is for the purpose of description and should not be regarded as limiting.

[0084] It is understood that any Sequence Identification Number (SEQ ID NO) disclosed in the instant application can refer to either a DNA sequence or a RNA sequence, depending on the context where that SEQ ID NO is mentioned, even if that SEQ ID NO is expressed only in a DNA sequence format or a RNA sequence format. For example, SEQ ID NO: 1315 is expressed in a DNA sequence format (e.g., reciting T for thymine), but it can refer to either a DNA sequence that corresponds to an endo 1,4 beta glucanase nucleic acid sequence, or the RNA sequence of an RNA molecule nucleic acid sequence. Similarly, though some sequences are expressed in a RNA sequence format (e.g., reciting U for uracil), depending on the actual type of molecule being described, it can refer to either the sequence of a RNA molecule comprising a dsRNA, or the sequence of a DNA molecule that corresponds to the RNA sequence shown. In any event, both DNA and RNA molecules having the sequences disclosed with any substitutes are envisioned.

[0085] Mosquitoes pose an important threat to human and animal health. Mosquitoes are vectors for numerous pathogens, including viruses, bacteria, protozoa and nematodes. In fact over 500 arthropod-borne viruses (arboviruses) have been identified, among which approximately 100 are harmful to humans. While mosquitoes transmit these harmful pathogens, arboviruses do not cause pathology in mosquitoes suggesting that the insect's immune system restricts virus infection to non-pathogenic levels, thus allowing the pathogen to replicate in the mosquito and be transmitted to humans and animals.

[0086] While reducing the present invention to practice, the present inventors have uncovered that feeding dsRNA to mosquito larvae, wherein the dsRNA specifically downregulates an expression of at least one mosquito pathogen resistance gene, makes adult mosquitoes of the larvae more susceptible to a pathogen which they carry and exterminates pathogenically infected mosquitoes.

[0087] Specifically, the present inventors have shown that soaking mosquito larvae in dsRNA targeting specific genes (e.g. MyD88 (AAEL007768), cactus (AAEL000709), AAEL003832, AAEL010179, AAEL007562) for 24 hours followed by feeding the larvae with agarose cubes containing dsRNA for two more days (until they reach pupa stage) efficiently increased the virus titer at 2 hours postinfection (FIGS. 7A-E). In addition, decreased expression level of the target genes MYD88 (FIG. 9C) and Real1A (FIG. 10C) and higher viral load associated with higher mortality rate in adult mosquitoes 15 days postinfection (FIGS. 9A-B and 10A-B) was illustrated.

[0088] The present inventors postulate that downregulating genes which are involved in mosquito pathogen resistance, including genes whose products are involved in RNA interference, piRNA pathway, immunity, metabolism, cytoskeleton, cell membrane, cell motility, extracellular structure, post-translational modification, protein turnover, chaperone, signal transduction, proteolysis, oxidoreductase activity, transcription, translation, diverse, transport, cell-cycle, energy production and conversion, chromatin structure and dynamics, and Toll and JAK/STAT pathways, can be used for extermination of pathogenically infected mosquitoes. Specifically, the present inventors uncovered that downregulating these genes by feeding dsRNA to mosquito larvae makes adult stage of these mosquitoes more susceptible to pathogenic infection that they carry (e.g. viral infection) and only those mosquitoes that contract the pathogen infection are killed.

[0089] Thus, according to one aspect of the present invention there is provided a method of controlling a pathogenically infected mosquito, the method comprising administering to a larva of a mosquito an isolated nucleic acid agent comprising a nucleic acid sequence which specifically downregulates an expression of at least one mosquito pathogen resistance gene product of the mosquito, wherein downregulation of the expression of the at least one mosquito pathogen resistance gene in the larva renders an adult stage of the mosquito lethally susceptible to the pathogen, thereby controlling the pathogenically infected mosquito.

[0090] As used herein the term “controlling” refers to managing the population of mosquitoes to reduce their damage to human health, economies, and enjoyment. According to some embodiments of the invention, mosquito management is typically effected using an agent for exterminating (e.g. destroying/killing mosquitoes) or reducing a population of mosquitoes.

[0091] The term “mosquito” or “mosquitoes” as used herein refers to an insect of the family Culicidae. The mosquito of the invention may include an adult mosquito, a mosquito larva, a pupa or an egg thereof.

[0092] An adult mosquito is defined as any of slender, long-legged insect that has long proboscis and scales on most parts of the body. The adult females of many species of mosquitoes are blood-eating pests. In feeding on blood, adult female mosquitoes transmit harmful diseases to humans and other mammals.

[0093] A mosquito larvae is defined as any of an aquatic insect which does not comprise legs, comprises a distinct head bearing mouth brushes and antennae, a bulbous thorax that is wider than the head and abdomen, a posterior anal papillae and either a pair of respiratory openings (in the subfamily Anophelinae) or an elongate siphon (in the subfamily Culicinae) borne near the end of the abdomen.

[0094] Typically, a mosquito's life cycle includes four separate and distinct stages: egg, larva, pupa, and adult. Thus, a mosquito's life cycle begins when eggs are laid on a water surface (e.g. Culex, Culiseta, and Anopheles species) or on damp soil that is flooded by water (e.g. Aedes species). Most eggs hatch into larvae within 48 hours. The larvae live in the water feeding on microorganisms and organic matter and come to the surface to breathe. They shed their skin four times growing larger after each molting and on the fourth molt the larva changes into a pupa. The pupal stage is a resting, non-feeding stage of about two days. At this time the mosquito turns into an adult. When development is complete, the pupal skin splits and the mosquito emerges as an adult. According to one embodiment, the mosquitoes are of the sub-families

[0095] Anophelinae and Culicinae. According to one embodiment, the mosquitoes are of the genus Culex, Culiseta, Anopheles and Aedes. Exemplary mosquitoes include, but are not limited to, Aedes species e.g. Aedes aegypti, Aedes albopictus, Aedes polynesiensis, Aedes australis, Aedes cantator, Aedes cinereus, Aedes rusticus, Aedes vexans; Anopheles species e.g. Anopheles gambiae, Anopheles freeborni, Anopheles arabiensis, Anopheles funestus, Anopheles gambiae Anopheles moucheti, Anopheles balabacensis, Anopheles baimaii, Anopheles culicifacies, Anopheles dirus, Anopheles latens, Anopheles leucosphyrus, Anopheles maculatus, Anopheles minimus, Anopheles fluviatilis s.l., Anopheles sundaicus Anopheles superpictus, Anopheles farauti, Anopheles punctulatus, Anopheles sergentii, Anopheles stephensi, Anopheles sinensis, Anopheles atroparvus, Anopheles pseudopunctipennis, Anopheles bellator and Anopheles cruzii; Culex species e.g. C. annulirostris, C. antennatus, C. jenseni, C. pipiens, C. pusillus, C. quinquefasciatus, C. rajah, C. restuans, C. salinarius, C. tarsalis, C. territans, C. theileri and C. tritaeniorhynchus; and Culiseta species e.g. Culiseta incidens, Culiseta impatiens, Culiseta inornata and Culiseta particeps.

[0096] According to one embodiment, the mosquitoes are capable of transmitting disease-causing pathogens. The pathogens transmitted by mosquitoes include viruses, protozoa, worms and bacteria.

[0097] Non-limiting examples of viral pathogens which may be transmitted by mosquitoes include the arbovirus pathogens such as Alphaviruses pathogens (e.g. Eastern Equine encephalitis virus, Western Equine encephalitis virus, Venezuelan Equine encephalitis virus, Ross River virus, Sindbis Virus and Chikungunya virus), Flavivirus pathogens (e.g. Japanese Encephalitis virus, Murray Valley Encephalitis virus, West Nile Fever virus, Yellow Fever virus, Dengue Fever virus, St. Louis encephalitis virus, and Tick-borne encephalitis virus), Bunyavirus pathogens (e.g. La Crosse Encephalitis virus, Rift Valley Fever virus, and Colorado Tick Fever virus), Orthobunyavirus pathogens (e.g. Oropouche virus) and Orbivirus (e.g. Bluetongue disease virus).

[0098] Non-limiting examples of worm pathogens which may be transmitted by mosquitoes include nematodes e.g. filarial nematodes such as Wuchereria bancrofti, Brugia malayi, Brugia pahangi, Brugia timori and heartworm (Dirofilaria immitis).

[0099] Non-limiting examples of bacterial pathogens which may be transmitted by mosquitoes include gram negative and gram positive bacteria including Yersinia pestis, Borellia spp, Rickettsia spp, and Erwinia carotovora.

[0100] Non-limiting examples of protozoa pathogens which may be transmitted by mosquitoes include the Malaria parasite of the genus Plasmodium e.g. Plasmodium falciparum, Plasmodium vivax, Plasmodium ovale, Plasmodium malariae, Plasmodium berghei, Plasmodium gallinaceum, and Plasmodium knowlesi.

[0101] As used herein, the phrase “pathogenically infected mosquito” refers to a mosquito carrying a disease-causing pathogen. Typically the mosquito is infected with the pathogen (e.g. via a blood meal) and acts as a vector for the pathogen, enabling replication of the pathogen (e.g. in the mid gut and salivary glands of the mosquito) and transmission thereof into a host.

[0102] It will be appreciated that the mosquito of the invention may be a healthy mosquito not infected or not yet infected by a pathogen.

[0103] A “host” may be any animal upon which the mosquito feeds and/or to which a mosquito is capable of transmitting a disease-causing pathogen. Non-limiting examples of hosts are mammals such as humans, domesticated pets (e.g. dogs and cats), wild animals (e.g. monkeys, rodents and wild cats), livestock animals (e.g. sheep, pigs, cattle, and horses), avians such as poultry (e.g. chickens, turkeys and ducks) and other animals such as crustaceans (e.g. prawns and lobsters), snakes and turtles.

[0104] According to one embodiment, the mosquito comprises a female mosquito being capable of transmitting a disease to a mammalian organism. According to another embodiment the female mosquito is pathogenically infected.

[0105] Non-limiting examples of mosquitoes and the pathogens which they transmit include species of the genus Anopheles (e.g. Anopheles gambiae) which transmit malaria parasites as well as microfilariae, arboviruses (including encephalitis viruses) and some species also transmit Wuchereria bancrofti; species of the genus Culex (e.g. C. pipiens) which transmit West Nile virus, filariasis, Japanese encephalitis, St. Louis encephalitis and avian malaria; species of the genus Aedes (e.g. Aedes aegypti, Aedes albopictus and Aedes polynesiensis) which transmit nematode worm pathogens (e.g. heartworm (Dirofilaria immitis)), arbovirus pathogens such as Alphaviruses pathogens that cause diseases such as Eastern Equine encephalitis, Western Equine encephalitis, Venezuelan equine encephalitis and Chikungunya disease; Flavivirus pathogens that cause diseases such as Japanese encephalitis, Murray Valley Encephalitis, West Nile fever, Yellow fever, Dengue fever, and Bunyavirus pathogens that cause diseases such as LaCrosse encephalitis, Rift Valley Fever, and Colorado tick fever.

[0106] According to one embodiment, pathogens that may be transmitted by Aedes aegypti are Dengue virus, Yellow fever virus, Chikungunya virus and heartworm (Dirofilaria immitis).

[0107] According to one embodiment, pathogens that may be transmitted by Aedes albopictus include West Nile Virus, Yellow Fever virus, St. Louis Encephalitis virus, Dengue virus, and Chikungunya fever virus.

[0108] According to one embodiment, pathogens that may be transmitted by Anopheles gambiae include malaria parasites of the genus Plasmodium such as, but not limited to, Plasmodium falciparum, Plasmodium vivax, Plasmodium ovale, Plasmodium malariae, Plasmodium berghei, Plasmodium gallinaceum, and Plasmodium knowlesi.

[0109] In another embodiment, the invention provides a method of controlling (e.g. exterminating) a pathogenically infected mosquito.

[0110] It will be appreciated that the mosquito of the invention is less likely to transmit a pathogen compared to its wild-type counterpart, since a mosquito encountering a pathogen (e.g. virus, protozoa, bacteria, nematode) will be impaired or exterminated (i.e. killed).

[0111] In one embodiment, the mosquito has an enhanced susceptibility to a pathogen.

[0112] As used herein, the term “enhanced susceptibility” refers to a mosquito which is more susceptible to a pathogen by at least 10%, 20%, 30%, 40%, 50%, or more, say 60%, 70%, 80%, 90% or more even 100% as compared to wild type (i.e. control) mosquito not treated by the agents of the invention.

[0113] Enhancing susceptibility of a mosquito to a pathogen is achieved by downregulating an expression of at least one mosquito pathogen resistance gene product of the mosquito.

[0114] As used herein, the term “mosquito pathogen resistance gene” refers to an endogenous gene of the mosquito (naturally occurring within the mosquito) whose product is involved in the natural resistance of the mosquito to a pathogen or to its products (e.g. toxins). According to one embodiment, a mosquito pathogen resistance gene is part of the mosquito's innate immunity.

[0115] As used herein, the term “endogenous” refers to a gene originating from within the organism, e.g. mosquito.

[0116] As used herein, the phrase “gene product” refers to an RNA molecule or a protein.

[0117] According to one embodiment, the mosquito pathogen resistance gene product is one which is essential for mosquito viability upon encounter with a pathogen. Downregulation of such a gene product would typically result in death of the mosquito upon encounter with the pathogen.

[0118] Specifically, in the absence of mosquito resistance to a pathogen (e.g. as a result of lack in digestive enzymes, digestive processes, intracellular processes and/or immune system), upon encounter with a pathogen (e.g. within a blood meal), the pathogen will typically replicate and exert a severe infection in the mosquito (e.g. in the midgut and/or salivary glands of the mosquito) and will overcome the natural barriers typically found in mosquitoes [e.g. the midgut infection barrier (MIB), the midgut escape barrier (MEB) and the salivary gland infection barrier (SIB)]. Thus, in the absence of mosquito resistance, the pathogen titers are significantly increased, the midgut infection is significantly increased, pathogen dissemination rates and extrinsic incubation periods are shortened and consequently high mortality of the mosquitoes is evident approximately 2 hours to 21 days (e.g. 12 hours to 15 days, 1 to 15 days, 3 to 10 days, 4 to 7 days) postinfection.

[0119] Exemplary pathogen resistance gene products that may be downregulated according to this aspect of the present invention include, but are not limited to, RNA interference related genes, piRNA pathway related genes, immunity related genes, metabolism related genes, cytoskeleton related genes, cell membrane related genes, cell motility related genes, extracellular structure related genes, post-translational modification related genes, protein turnover related genes, chaperone related genes, signal transduction related genes, proteolysis related genes, oxidoreductase activity related genes, transcription related genes, translation related genes, diverse related genes, transport related genes, cell-cycle related genes, energy production and conversion related genes, chromatin structure and dynamics related genes, Toll related genes and JAK/STAT related genes.

[0120] Tables 1A-B, below, provide a partial list of mosquito genes associated with pathogen resistance, which can be potential targets for reduction in expression by introducing the nucleic acid agent of the invention.

[0121] The present teachings contemplate the targeting of homologs and orthologs according to the selected mosquito species.

[0122] Homologous sequences include both orthologous and paralogous sequences. The term “paralogous” relates to gene-duplications within the genome of a species leading to paralogous genes. The term “orthologous” relates to homologous genes in different organisms due to ancestral relationship. Thus, orthologs are evolutionary counterparts derived from a single ancestral gene in the last common ancestor of given two species (Koonin E V and Galperin M Y (Sequence—Evolution—Function: Computational Approaches in Comparative Genomics. Boston: Kluwer Academic; 2003. Chapter 2, Evolutionary Concept in Genetics and Genomics. Available from: ncbi(dot)nlm(dot)nih(dot)gov/books/NBK20255) and therefore have great likelihood of having the same function. As such, orthologs usually play a similar role to that in the original species in another species.

[0123] Homology (e.g., percent homology, sequence identity+sequence similarity) can be determined using any homology comparison software computing a pairwise sequence alignment.

[0124] As used herein, “sequence identity” or “identity” in the context of two nucleic acid or polypeptide sequences includes reference to the residues in the two sequences which are the same when aligned. When percentage of sequence identity is used in reference to proteins it is recognized that residue positions which are not identical often differ by conservative amino acid substitutions, where amino acid residues are substituted for other amino acid residues with similar chemical properties (e.g. charge or hydrophobicity) and therefore do not change the functional properties of the molecule. Where sequences differ in conservative substitutions, the percent sequence identity may be adjusted upwards to correct for the conservative nature of the substitution. Sequences which differ by such conservative substitutions are to have “sequence similarity” or “similarity”. Means for making this adjustment are well-known to those of skill in the art. Typically this involves scoring a conservative substitution as a partial rather than a full mismatch, thereby increasing the percentage sequence identity. Thus, for example, where an identical amino acid is given a score of 1 and a non-conservative substitution is given a score of zero, a conservative substitution is given a score between zero and 1. The scoring of conservative substitutions is calculated, e.g., according to the algorithm of Henikoff S and Henikoff J G. [Amino acid substitution matrices from protein blocks. Proc. Natl. Acad. Sci. U.S.A. 1992, 89(22): 10915-9].

[0125] According to a specific embodiment, the homolog sequences are at least 60%, 65%, 70%, 75%, 80%, 85%, 90%, 95% or even identical to the sequences (nucleic acid or amino acid sequences) provided hereinbelow.

TABLE 1A
List of target genes

| Aedes aegypti | Culex | Anopheles gambiae | |
|---|---|---|---|
| Access. No. | Access. No. | Access. No. | Functional group |
| TOLL pathway | | | |
| related genes | | | |
| AAEL009176 | CPIJ013556 | AGAP002796 | pattern recognition |
| (SEQ ID NO: 1), | (SEQ ID NO: 6), | (SEQ ID NO: 15), | receptor |
| AAEL003889 | CP1J008997 | AGAP012409 | |
| (SEQ ID NO: 2), | (SEQ ID NO: 7), | (SEQ ID NO: 16), | |
| AAEL009178 | CP1J004325 | AGAP004455 | |
| (SEQ ID NO: 3), | (SEQ ID NO: 8), | (SEQ ID NO: 17), | |
| AAEL007626 | CPIJ003613 | AGAP002799 | |
| (SEQ ID NO: 4), | (SEQ ID NO: 9), | (SEQ ID NO: 18), | |
| AAEL000652 | CP1J004324 | AGAP002798 | |
| (SEQ ID NO: 5) | (SEQ ID NO: 10), | (SEQ ID NO: 19), | |
| | CPIJ004323 | AGAP006761 | |
| | (SEQ ID NO: 11), | (SEQ ID NO: 20) | |
| | CPIJ004321 | | |
| | (SEQ ID NO: 12), | | |
| | CPIJ005217 | | |
| | (SEQ ID NO: 13), | | |
| | CPIJ004320 | | |
| | (SEQ ID NO: 14) | | |
| AAEL007064 | CPIJ004231 | | pattern recognition |
| (SEQ ID NO: 21) | (SEQ ID NO: 22) | | receptor |
| AAEL007347 | CPIJ001059 | AGAP011325 | signal modulation |
| (SEQ ID NO: 23), | (SEQ ID NO: 32), | (SEQ ID NO: 40), | |
| AAEL014724 | CP1J020127 | AGAP004855 | |
| (SEQ ID NO: 24), | (SEQ ID NO: 33), | (SEQ ID NO: 41) | |
| AAEL003243 | CPIJ003622 | | |
| (SEQ ID NO: 25), | (SEQ ID NO: 34), | | |
| AAEL003280 | CPIJ016225 | | |
| (SEQ ID NO: 26), | (SEQ ID NO: 35), | | |
| AAEL003233 | CPIJ017738 | | |
| (SEQ ID NO: 27), | (SEQ ID NO: 36), | | |
| AAEL003279 | CPIJ010296 | | |
| (SEQ ID NO: 28), | (SEQ ID NO: 37), | | |
| AAEL012775 | CPIJ010295 | | |
| (SEQ ID NO: 29), | (SEQ ID NO: 38), | | |
| AAEL014163 | CPIJ001060 | | |
| (SEQ ID NO: 30), | (SEQ ID NO: 39) | | |
| AAEL003253 | | | |
| (SEQ ID NO: 31) | | | |
| AAEL013435 | CPIJ000273 | AGAP006484 | Toll |
| (SEQ ID NO: 42), | (SEQ ID NO: 48), | (SEQ ID NO: 53), | |
| AAEL013434 | CP1J000272 | AGAP006483 | |
| (SEQ ID NO: 43), | (SEQ ID NO: 49), | (SEQ ID NO: 54), | |
| AAEL000499 | CP1J009906 | AGAP007177 | |
| (SEQ ID NO: 44), | (SEQ ID NO: 50), | (SEQ ID NO: 55) | |
| AAEL001435 | CPIJ006792 | | |
| (SEQ ID NO: 45), | (SEQ ID NO: 51), | | |
| AAEL013433 | CPIJ014270 | | |
| (SEQ ID NO: 46), | (SEQ ID NO: 52) | | |
| AAEL001929 | | | |
| (SEQ ID NO: 47) | | | |
| AAEL014989 | CPIJ008514 | AGAP005552 | pattern recognition |
| (SEQ ID NO: 56), | (SEQ ID NO: 58) | (SEQ ID NO: 59) | receptor |
| AAEL011608 | | | |
| (SEQ ID NO: 57) | | | |
| AAEL006930 | CPIJ015741 | AGAP009515 | Toll |
| (SEQ ID NO: 60), | (SEQ ID NO: 62), | (SEQ ID NO: 65) | |
| AAEL007696 | CPIJ019376 | | |
| (SEQ ID NO: 61) | (SEQ ID NO: 63), | | |
| | CPIJ002469 | | |
| | (SEQ ID NO: 64) | | |
| AAEL015515 | | | Effector |
| (SEQ ID NO: 66) | | | |
| AAEL004522 | CPIJ016084 | AGAP008645 | Effector |
| (SEQ ID NO: 67) | (SEQ ID NO: 68) | (SEQ ID NO: 69) | |
| AAEL003723 | CPIJ005451 | AGAP007347 | Effector |
| (SEQ ID NO: 70), | (SEQ ID NO: 76), | (SEQ ID NO: 81), | |
| AAEL009670 | CP1J005450 | AGAP005717 | |
| (SEQ ID NO: 71), | (SEQ ID NO: 77), | (SEQ ID NO: 82), | |
| AAEL015404 | CPIJ002161 | AGAP007386 | |
| (SEQ ID NO: 72), | (SEQ ID NO: 78), | (SEQ ID NO: 83), | |
| AAEL005988 | CPIJ010731 | AGAP007343 | |
| (SEQ ID NO: 73), | (SEQ ID NO: 79), | (SEQ ID NO: 84), | |
| AAEL003712 | CPIJ010730 | AGAP007385 | |
| (SEQ ID NO: 74), | (SEQ ID NO: 80) | (SEQ ID NO: 85) | |
| AAEL010100 | | | |
| (SEQ ID NO: 75) | | | |
| JAK/STAT | | | |
| pathway related | | | |
| genes | | | |
| AAEL012471 | CP1J017416 | AGAP010083 | |
| (SEQ ID NO: 86) | (SEQ ID NO: 87) | (SEQ ID NO: 88) | |
| AAEL012553 | CPIJ001760 | AGAP008354 | |
| (SEQ ID NO: 89) | (SEQ ID NO: 90) | (SEQ ID NO: 91) | |
| AAEL009692 | CPIJ016471 | AGAP010423 | |
| (SEQ ID NO: 92) | (SEQ ID NO: 93), | (SEQ ID NO: 95), | |
| | CPIJ016469 | AGAP000099 | |
| | (SEQ ID NO: 94) | (SEQ ID NO: 96) | |
| AAEL006949 | | AGAP000880 | |
| (SEQ ID NO: 97), | | (SEQ ID NO: 100), | |
| AAEL006936 | | AGAP004844 | |
| (SEQ ID NO: 98), | | (SEQ ID NO: 101) | |
| AAEL000255 | | | |
| (SEQ ID NO: 99) | | | |
| AAEL000393 | CP1J003379 | AGAP011042 | |
| (SEQ ID NO: 102) | (SEQ ID NO: 103), | (SEQ ID NO: 105) | |
| | CPIJ003380 | | |
| | (SEQ ID NO: 104) | | |
| AAEL015099 | CP1J009163 | AGAP005031 | |
| (SEQ ID NO: 106) | (SEQ ID NO: 107) | (SEQ ID NO: 108) | |
| Signal | | | |
| Transduction | | | |
| related genes | | | |
| AAEL012230 | CPIJ005494 | | |
| (SEQ ID NO: 109), | (SEQ ID NO: 112) | | |
| AAEL015328 | | | |
| (SEQ ID NO: 110), | | | |
| AAEL012225 | | | |
| (SEQ ID NO: 111) | | | |
| RNAi/piRNA | | | |
| pathway related | | | |
| genes | | | |
| AAEL011753 | CP1J011746 | AGAP009887 | r2d2 |
| (SEQ ID NO: 113), | (SEQ ID NO: 117), | (SEQ ID NO: 120), | |
| AAEL007470 | CP1J000296 | | |
| (SEQ ID NO: 114), | (SEQ ID NO: 118), | AGAP009781 | |
| AAEL013721 | CPIJ004832 | (SEQ ID NO: 121) | |
| (SEQ ID NO: 115), | (SEQ ID NO: 119) | | |
| AAEL008687 | | | |
| (SEQ ID NO: 116), | | | |
| AAEL006794 | CPIJ010534 | AGAP012289 | dcr2 |
| (SEQ ID NO: 122) | (SEQ ID NO: 123) | (SEQ ID NO: 124) | |
| AAEL007823 | CPIJ005275 | AGAP008862 | PIWI |
| (SEQ ID NO: 125) | (SEQ ID NO: 126) | (SEQ ID NO: 127) | |
| AAEL013235 | CPIJ017541 | AGAP002829 | Spn-E |
| (SEQ ID NO: 128) | (SEQ ID NO: 129) | (SEQ ID NO: 130) | |
| Chromatin | | | |
| structure and | | | |
| dynamics related | | | |
| genes | | | |
| AAEL003833 | CPIJ012378 | AGAP012586 | histone H4 |
| (SEQ ID NO: 131), | (SEQ ID NO: 143), | (SEQ ID NO: 145), | |
| AAEL003863 | CP1J014768 | AGAP003909 | |
| (SEQ ID NO: 132), | (SEQ ID NO: 144) | (SEQ ID NO: 146), | |
| AAEL003823 | | AGAP005026 | |
| (SEQ ID NO: 133), | | (SEQ ID NO: 147), | |
| AAEL003846 | | AGAP012574 | |
| (SEQ ID NO: 134), | | (SEQ ID NO: 148), | |
| AAEL003838 | | AGAP012558 | |
| (SEQ ID NO: 135), | | (SEQ ID NO: 149), | |
| AAEL000517 | | AGAP005023 | |
| (SEQ ID NO: 136), | | (SEQ ID NO: 150), | |
| AAEL003814 | | AGAP012885 | |
| (SEQ ID NO: 137), | | (SEQ ID NO: 151), | |
| AAEL000501 | | AGAP010724 | |
| (SEQ ID NO: 138), | | (SEQ ID NO: 152) | |
| AAEL003689 | | | |
| (SEQ ID NO: 139), | | | |
| AAEL003673 | | | |
| (SEQ ID NO: 140), | | | |
| AAEL000490 | | | |
| (SEQ ID NO: 141), | | | |
| AAEL000513 | | | |
| (SEQ ID NO: 142) | | | |
| AAEL000497 | CPIJ015010 | AGAP012711 | histone H2 |
| (SEQ ID NO: 153), | (SEQ ID NO: 166), | (SEQ ID NO: 182), | |
| AAEL003669 | CPIJ014767 | AGAP003911 | |
| (SEQ ID NO: 154), | (SEQ ID NO: 167), | (SEQ ID NO: 183), | |
| AAEL003862 | CP1J012408 | AGAP012198 | |
| (SEQ ID NO: 155), | (SEQ ID NO: 168), | (SEQ ID NO: 184), | |
| AAEL000518 | CPIJ012399 | AGAP012895 | |
| (SEQ ID NO: 156), | (SEQ ID NO: 169), | (SEQ ID NO: 185), | |
| AAEL007925 | CPIJ012421 | AGAP003913 | |
| (SEQ ID NO: 157), | (SEQ ID NO: 170), | (SEQ ID NO: 186) | |
| AAEL000525 | CPIJ012390 | | |
| (SEQ ID NO: 158), | (SEQ ID NO: 171), | | |
| AAEL000494 | CPIJ012412 | | |
| (SEQ ID NO: 159), | (SEQ ID NO: 172), | | |
| AAEL003706 | CPIJ010360 | | |
| (SEQ ID NO: 160), | (SEQ ID NO: 173), | | |
| AAEL003851 | CPIJ012419 | | |
| (SEQ ID NO: 161), | (SEQ ID NO: 174), | | |
| AAEL003820 | CPIJ005867 | | |
| (SEQ ID NO: 162), | (SEQ ID NO: 175), | | |
| AAEL003687 | CPIJ012380 | | |
| (SEQ ID NO: 163), | (SEQ ID NO: 176), | | |
| AAEL003826 | CPIJ012403 | | |
| (SEQ ID NO: 164), | (SEQ ID NO: 177), | | |
| AAEL003818 | CPIJ015004 | | |
| (SEQ ID NO: 165) | (SEQ ID NO: 178), | | |
| | CPIJ012395 | | |
| | (SEQ ID NO: 179), | | |
| | CPIJ004104 | | |
| | (SEQ ID NO: 180), | | |
| | CPIJ012425 | | |
| | (SEQ ID NO: 181) | | |
| AAEL003950 | CPIJ011033 | AGAP010699 | helicase |
| (SEQ ID NO: 187) | (SEQ ID NO: 188) | (SEQ ID NO: 189) | |
| Metabolism | | | |
| related genes | | | |
| AAEL008418 | CPIJ005082 | AGAP002308 | pyrroline-5-carboxylate |
| (SEQ ID NO: 190) | (SEQ ID NO: 191) | (SEQ ID NO: 192) | reductase |
| Cytoskeleton | | | |
| related genes | | | |
| AAEL000335 | CPIJ003869 | AGAP008015 | lamin |
| (SEQ ID NO: 193) | (SEQ ID NO: 194) | (SEQ ID NO: 195) | |
| Proteolysis | | | |
| related genes | | | |
| AAEL002610 | CPIJ017789 | AGAP011792 | serine protease |
| (SEQ ID NO: 196), | (SEQ ID NO: 201), | (SEQ ID NO: 204), | |
| AAEL002593 | CP1J017793 | AGAP011783 | |
| (SEQ ID NO: 197), | (SEQ ID NO: 202), | (SEQ ID NO: 205), | |
| AAEL002600 | CPIJ017792 | AGAP011789 | |
| (SEQ ID NO: 198), | (SEQ ID NO: 203) | (SEQ ID NO: 206), | |
| AAEL002629 | | AGAP011781 | |
| (SEQ ID NO: 199), | | (SEQ ID NO: 207), | |
| AAEL002595 | | AGAP011780 | |
| (SEQ ID NO: 200) | | (SEQ ID NO: 208), | |
| | | AGAP011787 | |
| | | (SEQ ID NO: 209), | |
| | | AGAP011793 | |
| | | (SEQ ID NO: 210) | |
| AAEL013857 | CP1J004497 | AGAP004700 | |
| (SEQ ID NO: 211) | (SEQ ID NO: 212) | (SEQ ID NO: 213) | |
| transcription and | | | |
| translation | | | |
| related genes | | | |
| AAEL005004 | CPIJ009211 | | hypothetical protein |
| (SEQ ID NO: 214) | (SEQ ID NO: 215) | | AaeL |
| AAEL005226 | CP1J015541 | AGAP005819 | |
| (SEQ ID NO: 216), | (SEQ ID NO: 234), | (SEQ ID NO: 259), | |
| AAEL008917 | CPIJ007121 | AGAP006214 | |
| (SEQ ID NO: 217), | (SEQ ID NO: 235), | (SEQ ID NO: 260), | |
| AAEL009082 | CP1J000335 | AGAP009638 | |
| (SEQ ID NO: 218), | (SEQ ID NO: 236), | (SEQ ID NO: 261), | |
| AAEL009592 | CP1J008475 | AGAP000906 | |
| (SEQ ID NO: 219), | (SEQ ID NO: 237), | (SEQ ID NO: 262), | |
| AAEL012429 | CP1J018334 | AGAP011037 | |
| (SEQ ID NO: 220), | (SEQ ID NO: 238), | (SEQ ID NO: 263), | |
| AAEL000710 | CPIJ016494 | AGAP002907 | |
| (SEQ ID NO: 221), | (SEQ ID NO: 239), | (SEQ ID NO: 264), | |
| AAEL000021 | CP1J019878 | AGAP000904 | |
| (SEQ ID NO: 222), | (SEQ ID NO: 240), | (SEQ ID NO: 265) | |
| AAEL003589 | CPIJ020103 | | |
| (SEQ ID NO: 223), | (SEQ ID NO: 241), | | |
| AAEL011208 | CPIJ013244 | | |
| (SEQ ID NO: 224), | (SEQ ID NO: 242), | | |
| AAEL009079 | CPIJ011969 | | |
| (SEQ ID NO: 225), | (SEQ ID NO: 243), | | |
| AAEL009063 | CPIJ005309 | | |
| (SEQ ID NO: 226), | (SEQ ID NO: 244), | | |
| AAEL003603 | CPIJ019506 | | |
| (SEQ ID NO: 227), | (SEQ ID NO: 245), | | |
| AAEL007264 | CPIJ012797 | | |
| (SEQ ID NO: 228), | (SEQ ID NO: 246), | | |
| AAEL007465 | CPIJ015236 | | |
| (SEQ ID NO: 229), | (SEQ ID NO: 247), | | |
| AAEL000406 | CPIJ016969 | | |
| (SEQ ID NO: 230), | (SEQ ID NO: 248), | | |
| AAEL005940 | CPIJ002091 | | |
| (SEQ ID NO: 231), | (SEQ ID NO: 249), | | |
| AAEL015447 | CPIJ011518 | | |
| (SEQ ID NO: 232), | (SEQ ID NO: 250), | | |
| AAEL015509 | CPIJ015370 | | |
| (SEQ ID NO: 233) | (SEQ ID NO: 251), | | |
| | CPIJ003366 | | |
| | (SEQ ID NO: 252), | | |
| | CPIJ007027 | | |
| | (SEQ ID NO: 253), | | |
| | CPIJ020171 | | |
| | (SEQ ID NO: 254), | | |
| | CPIJ006503 | | |
| | (SEQ ID NO: 255), | | |
| | CPIJ001232 | | |
| | (SEQ ID NO: 256), | | |
| | CPIJ015841 | | |
| | (SEQ ID NO: 257), | | |
| | CPIJ019509 | | |
| | (SEQ ID NO: 258) | | |
| AAEL002422 | CPIJ009745 | AGAP003080 | cytoplasmic |
| (SEQ ID NO: 266), | (SEQ ID NO: 268), | (SEQ ID NO: 270) | polyadenylation element |
| AAEL012065 | CPIJ009440 | | binding protein |
| (SEQ ID NO: 267) | (SEQ ID NO: 269) | | |
| Immunity related | | | |
| genes | | | |
| AAEL011455 | | | galactose-specific C- |
| (SEQ ID NO: 271) | | | type lectin |
| AAEL007599 | CPIJ015762 | AGAP004531 | cathepsin B |
| (SEQ ID NO: 272), | (SEQ ID NO: 277), | (SEQ ID NO: 279) | |
| AAEL007585 | CPIJ015761 | | |
| (SEQ ID NO: 273), | (SEQ ID NO: 278) | | |
| AAEL007590 | | | |
| (SEQ ID NO: 274), | | | |
| AAEL015312 | | | |
| (SEQ ID NO: 275), | | | |
| AAEL012216 | | | |
| (SEQ ID NO: 276) | | | |
| AAEL007585 | CPIJ015762 | AGAP004531 | cathepsin B |
| (SEQ ID NO: 280), | (SEQ ID NO: 285), | (SEQ ID NO: 287) | |
| AAEL007599 | CPIJ015761 | | |
| (SEQ ID NO: 281), | (SEQ ID NO: 286) | | |
| AAEL007590 | | | |
| (SEQ ID NO: 282), | | | |
| AAEL015312 | | | |
| (SEQ ID NO: 283), | | | |
| AAEL012216 | | | |
| (SEQ ID NO: 284) | | | |
| AAEL007585 | CPIJ015762 | AGAP004531 | cathepsin B |
| (SEQ ID NO: 288), | (SEQ ID NO: 293), | (SEQ ID NO: 295) | |
| AAEL007599 | CPIJ015761 | | |
| (SEQ ID NO: 289), | (SEQ ID NO: 294) | | |
| AAEL007590 | | | |
| (SEQ ID NO: 290), | | | |
| AAEL015312 | | | |
| (SEQ ID NO: 291), | | | |
| AAEL012216 | | | |
| (SEQ ID NO: 292) | | | |
| Redox activity | | | |
| related genes | | | |
| AAEL003211 | CPIJ001081 | AGAP008143 | beta-carotene |
| (SEQ ID NO: 296) | (SEQ ID NO: 297) | (SEQ ID NO: 298) | dioxygenase |
| Additional genes | | | |
| AAEL001702 | CP1J015159 | AGAP005312 | |
| (SEQ ID NO: 299) | (SEQ ID NO: 300) | (SEQ ID NO: 301) | |

TABLE 1B
List of Aedes aegypti target genes

| | Aedes aegypti target genes | |
|---|---|---|
| eq id no | Gene symbol | Gene Name |
| 305 | AAEL001411 | myosin heavy chain, nonmuscle or smooth muscle |
| 306 | AAEL014394 | growth factor receptor-bound protein |
| 307 | AAEL000700 | cadherin |
| 308 | AAEL001028 | hypothetical protein |
| 309 | AAEL010410 | odorant receptor 9a, putative |
| 310 | AAEL011202 | bhlhzip transcription factor bigmax |
| 311 | AAEL003355 | conserved hypothetical protein |
| 312 | AAEL002920 | hypothetical protein |
| 313 | AAEL012339 | cdk1 |
| 314 | AAEL013329 | cdk1 |
| 315 | AAEL009962 | hypothetical protein |
| 316 | AAEL000931 | alkaline phosphatase |
| 317 | AAEL000776 | conserved hypothetical protein |
| 318 | AAEL009022 | adenylate cyclase type |
| 319 | AAEL005766 | fructose-bisphosphate aldolase |
| 320 | AAEL002473 | hypothetical protein |
| 321 | AAEL012551 | conserved hypothetical protein |
| 322 | AAEL011648 | cyclin d |
| 323 | AAEL001246 | Thymidylate kinase, putative |
| 324 | AAEL011892 | receptor for activated C kinase, putative |
| 325 | AAEL003581 | amidophosphoribosyltransferase |
| 326 | AAEL014001 | yellow protein precursor, putative |
| 327 | AAEL012865 | conserved hypothetical protein |
| 328 | AAEL002510 | serine hydroxymethyltransferase |
| 329 | AAEL014025 | cell division cycle 20 (cdc20) (fizzy) |
| 330 | AAEL011250 | conserved hypothetical protein |
| 331 | AAEL010818 | hypothetical protein |
| 332 | AAEL005522 | conserved hypothetical protein |
| 333 | AAEL003325 | niemann-pick C1 |
| 334 | AAEL009773 | geminin, putative |
| 335 | AAEL004710 | spingomyelin synthetase |
| 336 | AAEL003465 | hypothetical protein |
| 337 | AAEL012510 | IMD pathway signaling I-Kappa-B Kinase 2 (IKK2 IKK-gamma). |
| 338 | AAEL013749 | conserved hypothetical protein |
| 339 | AAEL012085 | hypothetical protein |
| 340 | AAEL015080 | conserved hypothetical protein |
| 341 | AAEL013320 | translocon-associated protein, delta subunit |
| 342 | AAEL008686 | hypothetical protein |
| 343 | AAEL000217 | serine/threonine protein kinase |
| 344 | AAEL007799 | regulator of chromosome condensation |
| 345 | AAEL013912 | conserved hypothetical protein |
| 346 | AAEL002388 | zinc finger protein |
| 347 | AAEL012224 | zinc finger protein |
| 348 | AAEL010899 | hypothetical protein |
| 349 | AAEL010430 | ras-related protein, putative |
| 350 | AAEL003650 | inhibitor of growth protein, ing1 |
| 351 | AAEL005631 | conserved hypothetical protein |
| 352 | AAEL011295 | conserved hypothetical protein |
| 353 | AAEL003606 | purine biosynthesis protein 6, pur6 |
| 354 | AAEL010762 | Actin-related protein 8 |
| 355 | AAEL009645 | hypothetical protein |
| 356 | AAEL004699 | conserved hypothetical protein |
| 357 | AAEL012356 | GPCR Somatostatin Family |
| 358 | AAEL008084 | phosphatidylserine receptor |
| 359 | AAEL001352 | scaffold attachment factor b |
| 360 | AAEL007848 | conserved hypothetical protein |
| 361 | AAEL014844 | conserved hypothetical protein |
| 362 | AAEL002495 | conserved hypothetical protein |
| 363 | AAEL011714 | conserved hypothetical protein |
| 364 | AAEL008952 | sentrin/sumo-specific protease |
| 365 | AAEL011141 | hypothetical protein |
| 366 | AAEL010905 | conserved hypothetical protein |
| 367 | AAEL013797 | conserved hypothetical protein |
| 368 | AAEL007526 | electron transfer flavoprotein-ubiquinone oxidoreductase |
| 369 | AAEL006832 | GPCR Frizzled/Smoothened Family |
| 370 | AAEL011069 | conserved hypothetical protein |
| 371 | AAEL006519 | conserved hypothetical protein |
| 372 | AAEL012635 | conserved hypothetical protein |
| 373 | AAEL010659 | lethal(2)essential for life protein, l2efl |
| 374 | AAEL013343 | lethal(2)essential for life protein, l2efl |
| 375 | AAEL011639 | WAP four-disulfide core domain protein 2 precursor, putative |
| 376 | AAEL005439 | mical |
| 377 | AAEL000236 | hypothetical protein |
| 378 | AAEL012566 | conserved hypothetical protein |
| 379 | AAEL002896 | conserved hypothetical protein |
| 380 | AAEL006649 | tnf receptor associated factor |
| 381 | AAEL001856 | adenosine kinase |
| 382 | AAEL003549 | hypothetical protein |
| 383 | AAEL012043 | secreted modular calcium-binding protein |
| 384 | AAEL003425 | conserved hypothetical protein |
| 385 | AAEL007832 | GPCR Muscarinic Acetylcholine Family |
| 386 | AAEL015037 | G-protein-linked acetylcholine receptor gar-2a |
| 387 | AAEL001420 | leucine-rich immune protein (Short) |
| 388 | AAEL009615 | ultraviolet wavelength sensitive opsin |
| 389 | AAEL007397 | Ecdysone-induced protein 75B isoform A Nuclear receptor |
| 390 | AAEL000153 | conserved hypothetical protein |
| 391 | AAEL008015 | hypothetical protein |
| 392 | AAEL013552 | conserved hypothetical protein |
| 393 | AAEL005083 | conserved hypothetical protein |
| 394 | AAEL012562 | circadian locomoter output cycles kaput protein (dclock) (dpas1) |
| 395 | AAEL000580 | conserved hypothetical protein |
| 396 | AAEL011417 | synaptojanin |
| 397 | AAEL000041 | forkhead box protein (AaegFOXM2) |
| 398 | AAEL000945 | conserved hypothetical protein |
| 399 | AAEL002355 | conserved hypothetical protein |
| 400 | AAEL009230 | conserved hypothetical protein |
| 401 | AAEL002653 | semaphorin |
| 402 | AAEL009305 | numb-associated kinase |
| 403 | AAEL003574 | hypothetical protein |
| 404 | AAEL013040 | hypothetical protein |
| 405 | AAEL002400 | hypothetical protein |
| 406 | AAEL009382 | lysine-specific demethylase NO66 |
| | | (EC 1.14.11.27)(Nucleolar protein 66) |
| 407 | AAEL008320 | conserved hypothetical protein |
| 408 | AAEL001667 | multicopper oxidase |
| 409 | AAEL007073 | hypothetical protein |
| 410 | AAEL003152 | werner syndrome helicase |
| 411 | AAEL015522 | conserved hypothetical protein |
| 412 | AAEL014368 | sap18 |
| 413 | AAEL004607 | Adenylyltransferase and sulfurtransferase MOCS3 |
| | | (Molybdenum cofactor synthesis protein 3) |
| | | [Includes Adenylyltransferase MOCS3(EC 2.7.7.—) |
| | | (Sulfur carrier protein MOCS2A |
| 414 | AAEL001073 | malic enzyme |
| 415 | AAEL006087 | conserved hypothetical protein |
| 416 | AAEL006925 | conserved hypothetical protein |
| 417 | AAEL015285 | conserved hypothetical protein |
| 418 | AAEL010576 | modifier of mdg4 |
| 419 | AAEL011995 | conserved hypothetical protein |
| 420 | AAEL002064 | conserved hypothetical protein |
| 421 | AAEL009589 | conserved hypothetical protein |
| 422 | AAEL000356 | cysteine-rich venom protein, putative |
| 423 | AAEL000503 | hypothetical protein |
| 424 | AAEL012920 | GPCR Galanin/Allatostatin Family |
| 425 | AAEL014002 | conserved hypothetical protein |
| 426 | AAEL005850 | Hormone receptor-like in 4 (nuclear receptor) |
| 427 | AAEL000102 | conserved hypothetical protein |
| 428 | AAEL011647 | paired box protein, putative |
| 429 | AAEL005381 | Dissatisfaction (Dsf) |
| 430 | AAEL009360 | serine/threonine-protein kinase PLK4 |
| | | (EC 2.7.11.21)(Polo-like kinase 4)(PLK-4) |
| | | (Serine/threonine-protein kinase SAK) |
| 431 | AAEL012105 | Zinc finger protein-like 1 homolog |
| 432 | AAEL007053 | hypothetical protein |
| 433 | AAEL009822 | GPCR Metabotropic glutamate Family |
| 434 | AAEL013175 | hypothetical protein |
| 435 | AAEL009531 | niemann-pick C1 |
| 436 | AAEL009841 | conserved hypothetical protein |
| 437 | AAEL010333 | conserved hypothetical protein |
| 438 | AAEL005627 | chordin |
| 439 | AAEL001526 | zinc finger protein |
| 440 | AAEL007408 | conserved hypothetical protein |
| 441 | AAEL013280 | rho guanine exchange factor |
| 442 | AAEL009508 | zinc finger protein |
| 443 | AAEL008839 | hypothetical protein |
| 444 | AAEL015216 | serine/threonine-protein kinase vrk |
| 445 | AAEL007436 | conserved hypothetical protein |
| 446 | AAEL014392 | hypothetical protein |
| 447 | AAEL004458 | Zinc finger CCCH-type with G patch domain-containing |
| | | protein |
| 448 | AAEL000087 | macroglobulin/complement |
| 449 | AAEL000256 | Class B Scavenger Receptor (CD36 domain). |
| 450 | AAEL000274 | Copper-Zinc(Cu—Zn) Superoxide Dismutase. |
| 451 | AAEL000709 | TOLL pathway signaling. |
| 452 | AAEL000765 | hexamerin 2 beta |
| 453 | AAEL001794 | macroglobulin/complement |
| 454 | AAEL002585 | serine protease |
| 455 | AAEL002595 | serine protease |
| 456 | AAEL002629 | serine protease |
| 457 | AAEL002730 | Serine Protease Inhibitor (serpin) likely cleavage at R/V. |
| 458 | AAEL003119 | C-Type Lectin (CTL). |
| 459 | AAEL003439 | Caspase (Short). |
| 460 | AAEL003849 | defensin anti-microbial peptide |
| 461 | AAEL004386 | heme peroxidase |
| 462 | AAEL004388 | heme peroxidase |
| 463 | AAEL004390 | heme peroxidase |
| 464 | AAEL005064 | Clip-Domain Serine Protease family B. |
| 465 | AAEL005325 | dopachrome-conversion enzyme (DCE) isoenzyme, putative |
| 466 | AAEL005443 | conserved hypothetical protein |
| 467 | AAEL005673 | Serine Protease Inhibitor (serpin) likely cleavage at K/F. |
| 468 | AAEL005738 | yellow protein precursor |
| 469 | AAEL005832 | programmed cell death |
| 470 | AAEL006271 | copper-zinc (Cu—Zn) superoxide dismutase |
| 471 | AAEL006383 | chymotrypsin, putative |
| 472 | AAEL006576 | clip-domain serine protease, putative |
| 473 | AAEL006702 | fibrinogen and fibronectin |
| 474 | AAEL008364 | Serine Protease Inhibitor (serpin) likely cleavage at S/S. |
| 475 | AAEL009436 | conserved hypothetical protein |
| 476 | AAEL009861 | conserved hypothetical protein |
| 477 | AAEL010973 | conserved hypothetical protein |
| 478 | AAEL011498 | copper-zinc (Cu—Zn) superoxide dismutase |
| 479 | AAEL011699 | hypothetical protein |
| 480 | AAEL012267 | macroglobulin/complement |
| 481 | AAEL012958 | conserved hypothetical protein |
| 482 | AAEL013441 | Toll-like receptor |
| 483 | AAEL013757 | hexamerin 2 beta |
| 484 | AAEL013936 | Serine Protease Inhibitor (serpin) likely cleavage at I/S. |
| | | Transcript A. |
| 485 | AAEL014078 | serine protease inhibitor, serpin |
| 486 | AAEL014079 | serine protease inhibitor, serpin |
| 487 | AAEL014238 | aromatic amino acid decarboxylase |
| 488 | AAEL014390 | galactose-specific C-type lectin, putative |
| 489 | AAEL014548 | Thioredoxin Peroxidase. |
| 490 | AAEL014755 | tep2 |
| 491 | AAEL014989 | peptidoglycan recognition protein-1, putative |
| 492 | AAEL015322 | slit protein |
| 493 | AAEL007097 | 4-nitrophenylphosphatase |
| 494 | AAEL007323 | deoxyuridine 5′-triphosphate nucleotidohydrolase |
| 495 | AAEL006239 | glycerol kinase |
| 496 | AAEL002542 | triosephosphate isomerase |
| 497 | AAEL010208 | 3-hydroxyisobutyrate dehydrogenase |
| 498 | AAEL000006 | phosphoenolpyruvate carboxykinase |
| 499 | AAEL009245 | 3-hydroxyisobutyrate dehydrogenase, putative |
| 500 | AAEL015143 | glycine rich RNA binding protein, putative |
| 501 | AAEL006684 | Putative oxidoreductase GLYR1 homolog |
| | | (EC 1.—.—.—)(Glyoxylate reductase 1 homolog) |
| | | (Nuclear protein NP60 homolog) |
| 502 | AAEL012580 | 3-hydroxyisobutyrate dehydrogenase |
| 503 | AAEL013819 | Bj1 protein, putative |
| 504 | AAEL008849 | selenophosphate synthase |
| 505 | AAEL003084 | dolichyl-phosphate beta-D-mannosyltransferase, putative |
| 506 | AAEL014186 | dolichyl-phosphate beta-D-mannosyltransferase, putative |
| 507 | AAEL010751 | methylenetetrahydrofolate dehydrogenase |
| 508 | AAEL013877 | Glucosamine-6-phosphate isomerase |
| | | (EC 3.5.99.6)(Glucosamine-6-phosphate deaminase) |
| | | (GlcN6P deaminase)(GNPDA) |
| 509 | AAEL008166 | malate dehydrogenase |
| 510 | AAEL009721 | paraplegin |
| 511 | AAEL012337 | goliath E3 ubiquitin ligase |
| 512 | AAEL007593 | Clip-Domain Serine Protease family C. |
| 513 | AAEL003769 | methionine aminopeptidase |
| 514 | AAEL008416 | pre-mRNA processing factor |
| 515 | AAEL005201 | hydroxymethylglutaryl-coa synthase |
| 516 | AAEL008905 | host cell factor C1 |
| 517 | AAEL001112 | conserved hypothetical protein |
| 518 | AAEL002655 | matrix metalloproteinase |
| 519 | AAEL006323 | hypothetical protein |
| 520 | AAEL007649 | cell cycle checkpoint protein rad17 |
| 521 | AAEL004589 | small calcium-binding mitochondrial carrier, putative |
| 522 | AAEL011704 | heat shock protein |
| 523 | AAEL001052 | heat shock protein, putative |
| 524 | AAEL006362 | mitochondrial solute carrier |
| 525 | AAEL010002 | mitochondrial import inner membrane translocase subunit |
| | | tim17 |
| 526 | AAEL015575 | mitochondrial import inner membrane translocase subunit |
| | | tim17 |
| 527 | AAEL005413 | mitochondrial ribosomal protein, S11, putative |
| 528 | AAEL009964 | conserved hypothetical protein |
| 529 | AAEL010673 | NADH dehydrogenase, putative |
| 530 | AAEL001615 | mitochondrial ribosomal protein, S18C, putative |
| 531 | AAEL003215 | heat shock factor binding protein, putative |
| 532 | AAEL012499 | histone H2A |
| 533 | AAEL008500 | DEAD box ATP-dependent RNA helicase |
| 534 | AAEL007609 | histone H2A |
| 535 | AAEL005114 | RNA and export factor binding protein |
| 536 | AAEL015263 | RNA and export factor binding protein |
| 537 | AAEL006473 | arginine/serine-rich splicing factor |
| 538 | AAEL007928 | eukaryotic translation initiation factor 4 gamma |
| 539 | AAEL010340 | serine/arginine rich splicing factor |
| 540 | AAEL010402 | DEAD box ATP-dependent RNA helicase |
| 541 | AAEL003401 | DNA-directed RNA polymerase II 19 kDa polypeptide rpb7 |
| 542 | AAEL006135 | Nuclear cap-binding protein subunit 2 (20 kDa nuclear |
| | | cap-binding protein)(NCBP 20 kDa subunit)(CBP20) |
| 543 | AAEL009913 | DEAD box ATP-dependent RNA helicase |
| 544 | AAEL007078 | Eukaryotic translation initiation factor 3 subunit A |
| | | (eIF3a)(Eukaryotic translation initiation factor 3 subunit 10) |
| 545 | AAEL007923 | eukaryotic translation initiation factor 4 gamma |
| 546 | AAEL010612 | alternative splicing type 3 and, putative |
| 547 | AAEL011687 | alternative splicing type 3 and, putative |
| 548 | AAEL003893 | DNA repair protein xp-c/rad4 |
| 549 | AAEL006883 | conserved hypothetical protein |
| 550 | AAEL012585 | 60S ribosomal protein L7 |
| 551 | AAEL014429 | T-box transcription factor tbx20 |
| 552 | AAEL000098 | hypothetical protein |
| 553 | AAEL004174 | T-box transcription factor tbx6 |
| 554 | AAEL007458 | amino acid transporter |
| 555 | AAEL011470 | cis,cis-muconate transport protein MucK, putative |
| 556 | AAEL013146 | mfs transporter |
| 557 | AAEL002525 | amino acids transporter |
| 558 | AAEL006879 | folate carrier protein |
| 559 | AAEL012183 | mfs transporter |
| 560 | AAEL008878 | diacylglycerol o-acyltransferase |
| 561 | AAEL001968 | zinc transporter |
| 562 | AAEL009362 | cationic amino acid transporter |
| 563 | AAEL008138 | ABC transporter |
| 564 | AAEL005635 | nucleoporin |
| 565 | AAEL011679 | ion channel nompc |
| 566 | AAEL009421 | cyclophilin-r |
| 567 | AAEL003433 | copper-transporting ATPase 1, 2 (copper pump 1, 2) |
| 568 | AAEL006526 | neurotransmitter gated ion channel |
| 569 | AAEL004268 | Sialin, Sodium/sialic acid cotransporter, putative |
| 570 | AAEL005991 | tricarboxylate transport protein |
| 571 | AAEL009206 | organic cation transporter |
| 572 | AAEL002756 | synaptotagmin-4, |
| 573 | AAEL001405 | clathrin coat assembly protein |
| 574 | AAEL000675 | hypothetical protein |
| 575 | AAEL000727 | hypothetical protein |
| 576 | AAEL000969 | hypothetical protein |
| 577 | AAEL002095 | conserved hypothetical protein |
| 578 | AAEL002803 | conserved hypothetical protein |
| 579 | AAEL002975 | hypothetical protein |
| 580 | AAEL002979 | conserved hypothetical protein |
| 581 | AAEL003089 | conserved hypothetical protein |
| 582 | AAEL003131 | conserved hypothetical protein |
| 583 | AAEL003316 | hypothetical protein |
| 584 | AAEL003430 | conserved hypothetical protein |
| 585 | AAEL004498 | hypothetical protein |
| 586 | AAEL004604 | hypothetical protein |
| 587 | AAEL004625 | conserved hypothetical protein |
| 588 | AAEL004734 | conserved hypothetical protein |
| 589 | AAEL004754 | hypothetical protein |
| 590 | AAEL004976 | conserved hypothetical protein |
| 591 | AAEL005121 | conserved hypothetical protein |
| 592 | AAEL005192 | hypothetical protein |
| 593 | AAEL005389 | conserved hypothetical protein |
| 594 | AAEL006001 | conserved hypothetical protein |
| 595 | AAEL006072 | hypothetical protein |
| 596 | AAEL006243 | hypothetical protein |
| 597 | AAEL006247 | conserved hypothetical protein |
| 598 | AAEL006502 | conserved hypothetical protein |
| 599 | AAEL006606 | hypothetical protein |
| 600 | AAEL006755 | conserved hypothetical protein |
| 601 | AAEL007744 | hypothetical protein |
| 602 | AAEL007940 | gustatory receptor Gr77 |
| 603 | AAEL008439 | conserved hypothetical protein |
| 604 | AAEL008492 | conserved hypothetical protein |
| 605 | AAEL008636 | conserved hypothetical protein |
| 606 | AAEL009070 | hypothetical protein |
| 607 | AAEL009082 | hypothetical protein |
| 608 | AAEL009247 | conserved hypothetical protein |
| 609 | AAEL009322 | hypothetical protein |
| 610 | AAEL009385 | hypothetical protein |
| 611 | AAEL009473 | conserved hypothetical protein |
| 612 | AAEL009565 | conserved hypothetical protein |
| 613 | AAEL010022 | hypothetical protein |
| 614 | AAEL010113 | conserved hypothetical protein |
| 615 | AAEL010155 | hypothetical protein |
| 616 | AAEL010407 | conserved hypothetical protein |
| 617 | AAEL010898 | conserved hypothetical protein |
| 618 | AAEL011737 | hypothetical protein |
| 619 | AAEL011771 | hypothetical protein |
| 620 | AAEL011826 | conserved hypothetical protein |
| 621 | AAEL011872 | conserved hypothetical protein |
| 622 | AAEL012058 | hypothetical protein |
| 623 | AAEL012504 | hypothetical protein |
| 624 | AAEL012742 | conserved hypothetical protein |
| 625 | AAEL012754 | hypothetical protein |
| 626 | AAEL013024 | hypothetical protein |
| 627 | AAEL013037 | conserved hypothetical protein |
| 628 | AAEL013169 | conserved hypothetical protein |
| 629 | AAEL013776 | predicted protein |
| 630 | AAEL013977 | conserved hypothetical protein |
| 631 | AAEL014126 | hypothetical protein |
| 632 | AAEL014294 | conserved hypothetical protein |
| 633 | AAEL014816 | hypothetical protein |
| 634 | AAEL015613 | hypothetical protein |
| 635 | AAEL015634 | conserved hypothetical protein |
| 636 | AAEL001411 | myosin heavy chain, nonmuscle or smooth muscle |
| 637 | AAEL013778 | F-actin capping protein alpha |
| 638 | AAEL010510 | conserved hypothetical protein |
| 639 | AAEL011154 | hypothetical protein |
| 640 | AAEL004936 | conserved hypothetical protein |
| 641 | AAEL010979 | growth factor receptor-bound protein |
| 642 | AAEL001477 | laminin alpha-1, 2 chain |
| 643 | AAEL001904 | arp2/3 |
| 644 | AAEL002771 | microtubule binding protein, putative |
| 645 | AAEL005845 | beta chain spectrin |
| 646 | AAEL013808 | fascin |
| 647 | AAEL004440 | tubulin-specific chaperone e |
| 648 | AAEL000700 | cadherin |
| 649 | AAEL002761 | tropomyosin invertebrate |
| 650 | AAEL004668 | septin |
| 651 | AAEL003027 | conserved hypothetical protein |
| 652 | AAEL002185 | cuticle protein, putative |
| 653 | AAEL009527 | conserved hypothetical protein |
| 654 | AAEL014483 | conserved hypothetical protein |
| 655 | AAEL006340 | conserved hypothetical protein |
| 656 | AAEL012207 | myosin light chain 1, |
| 657 | AAEL008185 | conserved hypothetical protein |
| 658 | AAEL000048 | gustatory receptor Gr4 |
| 659 | AAEL003593 | hypothetical protein |
| 660 | AAEL015071 | gustatory receptor 64a, putative |
| 661 | AAEL013882 | tkr |
| 662 | AAEL007653 | allantoinase |
| 663 | AAEL000820 | dimethylaniline monooxygenase |
| 664 | AAEL014301 | hypothetical protein |
| 665 | AAEL003989 | GTP-binding protein alpha subunit, gna |
| 666 | AAEL011384 | hypothetical protein |
| 667 | AAEL010674 | hypothetical protein |
| 668 | AAEL007401 | roundabout, putative |
| 669 | AAEL006619 | conserved hypothetical protein |
| 670 | AAEL011105 | adducin |
| 671 | AAEL003220 | hypothetical protein |
| 672 | AAEL013028 | zinc finger protein |
| 673 | AAEL010755 | hypothetical protein |
| 674 | AAEL011552 | hypothetical protein |
| 675 | AAEL010301 | conserved hypothetical protein |
| 676 | AAEL008027 | hypothetical protein |
| 677 | AAEL014991 | hypothetical protein |
| 678 | AAEL004710 | spingomyelin synthetase |
| 679 | AAEL000405 | odd Oz protein |
| 680 | AAEL014746 | o-linked n-acetylglucosamine transferase, ogt |
| 681 | AAEL004715 | b-cell translocation protein |
| 682 | AAEL009646 | conserved hypothetical protein |
| 683 | AAEL003623 | conserved hypothetical protein |
| 684 | AAEL014042 | protein phosphatase pp2a regulatory subunit b |
| 685 | AAEL009249 | coronin |
| 686 | AAEL004351 | casein kinase |
| 687 | AAEL008806 | testis development protein prtd |
| 688 | AAEL003470 | conserved hypothetical protein |
| 689 | AAEL001434 | coronin |
| 690 | AAEL013969 | conserved hypothetical protein |
| 691 | AAEL012915 | als2cr7 |
| 692 | AAEL003571 | factor for adipocyte differentiation |
| 693 | AAEL001946 | four and a half lim domains |
| 694 | AAEL005795 | conserved hypothetical protein |
| 695 | AAEL007705 | hect E3 ubiquitin ligase |
| 696 | AAEL002705 | nucleolar protein c7b |
| 697 | AAEL005241 | lateral signaling target protein 2 |
| 698 | AAEL001853 | rac-GTP binding protein |
| 699 | AAEL003698 | conserved hypothetical protein |
| 700 | AAEL008879 | Kynurenine 3-monooxygenase (EC 1.14.13.9)(Kynurenine |
| | | 3-hydroxylase) |
| 701 | AAEL004501 | s-adenosylmethionine synthetase |
| 702 | AAEL003145 | bestrophin 2,3,4 |
| 703 | AAEL006786 | GTPase_rho |
| 704 | AAEL008171 | double-stranded RNA-binding protein zn72d |
| 705 | AAEL008007 | conserved hypothetical protein |
| 706 | AAEL010665 | developmentally regulated RNA-binding protein |
| 707 | AAEL013057 | serine/threonine-protein kinase wnk 1,3,4 |
| 708 | AAEL002082 | latent nuclear antigen, putative |
| 709 | AAEL002090 | conserved hypothetical protein |
| 710 | AAEL004041 | flotillin-2 |
| 711 | AAEL010676 | regulator of g protein signaling |
| 712 | AAEL008739 | shc transforming protein |
| 713 | AAEL011061 | hypothetical protein |
| 714 | AAEL007479 | hypothetical protein |
| 715 | AAEL014851 | mediator complex subunit rgr-1 |
| 716 | AAEL005930 | ubiquitin-protein ligase |
| 717 | AAEL002277 | cAMP-dependent protein kinase type i-beta regulatory |
| | | subunit |
| 718 | AAEL009422 | conserved hypothetical protein |
| 719 | AAEL006460 | par-6 gamma |
| 720 | AAEL001848 | conserved hypothetical protein |
| 721 | AAEL002607 | conserved hypothetical protein |
| 722 | AAEL000090 | secretory carrier-associated membrane protein (scamp) |
| 723 | AAEL005535 | conserved hypothetical protein |
| 724 | AAEL010344 | SEC14, putative |
| 725 | AAEL011006 | Guanylate kinase |
| 726 | AAEL006539 | serine/threonine protein kinase |
| 727 | AAEL005284 | receptor tyrosine phosphatase type r2a |
| 728 | AAEL009495 | rab6-interacting |
| 729 | AAEL005400 | 2-hydroxyacid dehydrogenase |
| 730 | AAEL000395 | Ultra spiracleisoform A nuclear receptor |
| 731 | AAEL002175 | conserved hypothetical protein |
| 732 | AAEL010170 | ras-related protein Rab-8A, putative |
| 733 | AAEL007889 | F-spondin |
| 734 | AAEL008078 | clk2 |
| 735 | AAEL014510 | sprouty |
| 736 | AAEL011417 | synaptojanin |
| 737 | AAEL000591 | hypothetical protein |
| 738 | AAEL001528 | hypothetical protein |
| 739 | AAEL005369 | zinc finger protein |
| 740 | AAEL010668 | quinone oxidoreductase |
| 741 | AAEL001099 | DEAD box polypeptide |
| 742 | AAEL002451 | zinc finger protein |
| 743 | AAEL003845 | Ets domain-containing protein |
| 744 | AAEL011970 | GPCR Purine/Adenosine Family |
| 745 | AAEL007322 | phosphatidate phosphatase |
| 746 | AAEL010561 | conserved hypothetical protein |
| 747 | AAEL006780 | hypothetical protein |
| 748 | AAEL007436 | conserved hypothetical protein |
| 749 | AAEL000737 | rab6 GTPase activating protein, gapcena (rabgap1 protein) |
| 750 | AAEL001133 | conserved hypothetical protein |
| 751 | AAEL005683 | conserved hypothetical protein |
| 752 | AAEL007375 | pyruvate dehydrogenase |
| 753 | AAEL001393 | triple functional domain, trio |
| 754 | AAEL005238 | mck1 |
| 755 | AAEL009874 | conserved hypothetical protein |
| 756 | AAEL001375 | Y-box binding protein |
| 757 | AAEL013308 | odd Oz protein |
| 758 | AAEL001398 | guanine nucleotide exchange factor |
| 759 | AAEL009171 | conserved hypothetical protein |
| 760 | AAEL004964 | hypothetical protein |
| 761 | AAEL009264 | hypothetical protein |
| 762 | AAEL001898 | conserved hypothetical protein |
| 763 | AAEL000421 | protein farnesyltransferase alpha subunit/rab geranylgeranyl |
| | | transferase alpha subunit |
| 764 | AAEL012554 | maltose phosphorylase |
| 765 | AAEL000262 | conserved hypothetical protein |
| 766 | AAEL000770 | platelet-activating factor acetylhydrolase isoform 1b alpha |
| | | subunit |
| 767 | AAEL003976 | conserved hypothetical protein |
| 768 | AAEL002937 | hypothetical protein |
| 769 | AAEL003540 | conserved hypothetical protein |
| 770 | AAEL005706 | triacylglycerol lipase |
| 771 | AAEL007662 | casein kinase |
| 772 | AAEL013619 | dolichyl-diphosphooligosaccharide protein |
| | | glycosyltransferase |
| 773 | AAEL004209 | opioid-binding protein/cell adhesion molecule, putative |
| 774 | AAEL003750 | conserved hypothetical protein |
| 775 | AAEL004709 | protein phosphatase type 2c |
| 776 | AAEL009382 | lysine-specific demethylase NO66 |
| | | (EC 1.14.11.27)(Nucleolar protein 66) |
| 777 | AAEL014999 | conserved hypothetical protein |
| 778 | AAEL012076 | conserved hypothetical protein |
| 779 | AAEL013334 | conserved hypothetical protein |
| 780 | AAEL005861 | vacuolar sorting protein (vps) |
| 781 | AAEL002251 | conserved hypothetical protein |
| 782 | AAEL009645 | hypothetical protein |
| 783 | AAEL000713 | reticulon/nogo |
| 784 | AAEL006651 | dystrophin |
| 785 | AAEL009606 | conserved hypothetical protein |
| 786 | AAEL008591 | zinc finger protein, putative |
| 787 | AAEL013459 | conserved hypothetical protein |
| 788 | AAEL006041 | conserved hypothetical protein |
| 789 | AAEL013510 | smaug protein |
| 790 | AAEL005528 | conserved hypothetical protein |
| 791 | AAEL003824 | conserved hypothetical protein |
| 792 | AAEL011575 | conserved hypothetical protein |
| 793 | AAEL006990 | conserved hypothetical protein |
| 794 | AAEL002306 | hect E3 ubiquitin ligase |
| 795 | AAEL013068 | protein phsophatase-2a |
| 796 | AAEL005320 | skeletrophin |
| 797 | AAEL000079 | hypothetical protein |
| 798 | AAEL010020 | Mediator of RNA polymerase II transcription subunit 14 |
| | | (Mediator complex subunit 14) |
| 799 | AAEL007011 | conserved hypothetical protein |
| 800 | AAEL000399 | conserved hypothetical protein |
| 801 | AAEL001919 | protein tyrosine phosphatase, non-receptor type nt1 |
| 802 | AAEL005302 | beta-1,4-galactosyltransferase |
| 803 | AAEL003509 | smap1 |
| 804 | AAEL003955 | hypothetical protein |
| 805 | AAEL003928 | pdgf/vegf receptor |
| 806 | AAEL000824 | hypothetical protein |
| 807 | AAEL004472 | hypothetical protein |
| 808 | AAEL010750 | hypothetical protein |
| 809 | AAEL002706 | hypothetical protein |
| 810 | AAEL007884 | conserved membrane protein at 44E, putative |
| 811 | AAEL008107 | f14p3.9 protein (auxin transport protein) |
| 812 | AAEL000857 | conserved hypothetical protein |
| 813 | AAEL014931 | sarm1 |
| 814 | AAEL001709 | hypothetical protein |
| 815 | AAEL008733 | histidine triad (hit) protein member |
| 816 | AAEL005502 | conserved hypothetical protein |
| 817 | AAEL001640 | multicopper oxidase |
| 818 | AAEL003799 | autophagy related gene |
| 819 | AAEL002142 | conserved hypothetical protein |
| 820 | AAEL015466 | conserved hypothetical protein |
| 821 | AAEL007687 | transmembrane 9 superfamily protein member 4 |
| 822 | AAEL013280 | rho guanine exchange factor |
| 823 | AAEL003454 | phocein protein, putative |
| 824 | AAEL001152 | beta-1,3-galactosyltransferase-6 |
| 825 | AAEL008793 | conserved hypothetical protein |
| 826 | AAEL007455 | thrombospondin |
| 827 | AAEL013072 | conserved hypothetical protein |
| 828 | AAEL007370 | conserved hypothetical protein |
| 829 | AAEL002732 | nephrin |
| 830 | AAEL002364 | hypothetical protein |
| 831 | AAEL007665 | hypothetical protein |
| 832 | AAEL002637 | tripartite motif protein trim9 |
| 833 | AAEL011623 | conserved hypothetical protein |
| 834 | AAEL014622 | conserved hypothetical protein |
| 835 | AAEL015487 | zinc finger protein, putative |
| 836 | AAEL010229 | hypothetical protein |
| 837 | AAEL004412 | polo kinase kinase |
| 838 | AAEL002448 | hypothetical protein |
| 839 | AAEL001388 | hypothetical protein |
| 840 | AAEL012998 | conserved hypothetical protein |
| 841 | AAEL013231 | hypothetical protein |
| 842 | AAEL010062 | conserved hypothetical protein |
| 843 | AAEL007199 | hypothetical protein |
| 844 | AAEL005109 | WD-repeat protein |
| 845 | AAEL003312 | hypothetical protein |
| 846 | AAEL013430 | putative G-protein coupled receptor (GPCR) |
| 847 | AAEL003508 | serine-pyruvate aminotransferase |
| 848 | AAEL002120 | zinc finger protein |
| 849 | AAEL004508 | hypothetical protein |
| 850 | AAEL012570 | hypothetical protein |
| 851 | AAEL001569 | conserved hypothetical protein |
| 852 | AAEL001094 | conserved hypothetical protein |
| 853 | AAEL000165 | conserved hypothetical protein |
| 854 | AAEL012086 | leucine-rich immune protein (Long) |
| 855 | AAEL009520 | leucine-rich immune protein (Long) |
| 856 | AAEL000703 | glycogen phosphorylase |
| 857 | AAEL007677 | phospholysine phosphohistidine inorganic pyrophosphate |
| | | phosphatase |
| 858 | AAEL011220 | Ati or CPXV158 protein, putative |
| 859 | AAEL001635 | conserved hypothetical protein |
| 860 | AAEL000541 | fasciclin, putative |
| 861 | AAEL005216 | Conserved hypothetical protein |
| 862 | AAEL004221 | glycogen synthase |
| 863 | AAEL004150 | fibrinogen and fibronectin |
| 864 | AAEL012187 | lethal(3)malignant brain tumor |
| 865 | AAEL003651 | conserved hypothetical protein |
| 866 | AAEL003729 | Probable hydroxyacid-oxoacid transhydrogenase, |
| | | mitochondrial Precursor (HOT)(EC 1.1.99.24) |
| 867 | AAEL013453 | sarcolemmal associated protein, putative |
| 868 | AAEL001650 | conserved hypothetical protein |
| 869 | AAEL002569 | serine/threonine kinase |
| 870 | AAEL012238 | glutaredoxin, putative |
| 871 | AAEL004229 | glutathione transferase |
| 872 | AAEL011596 | mitotic checkpoint serine/threonine-protein kinase bub1 and |
| | | bubr1 |
| 873 | AAEL006207 | conserved hypothetical protein |
| 874 | AAEL014596 | hypothetical protein |
| 875 | AAEL012391 | conserved hypothetical protein |
| 876 | AAEL013974 | conserved hypothetical protein |
| 877 | AAEL008719 | Sm protein G, putative |
| 878 | AAEL008316 | mitotic spindle assembly checkpoint protein mad2 |
| 879 | AAEL008646 | fibrinogen and fibronectin |
| 880 | AAEL011235 | conserved hypothetical protein |
| 881 | AAEL008716 | conserved hypothetical protein |
| 882 | AAEL015555 | conserved hypothetical protein |
| 883 | AAEL012628 | conserved hypothetical protein |
| 884 | AAEL000465 | conserved hypothetical protein |
| 885 | AAEL008369 | acyl phosphatase, putative |
| 886 | AAEL004512 | zinc finger protein |
| 887 | AAEL005557 | hypothetical protein |
| 888 | AAEL001653 | fetal globin-inducing factor |
| 889 | AAEL010622 | hypothetical protein |
| 890 | AAEL007907 | serine/threonine protein kinase |
| 891 | AAEL010013 | WD-repeat protein |
| 892 | AAEL002739 | conserved hypothetical protein |
| 893 | AAEL011834 | hypothetical protein |
| 894 | AAEL000147 | single-stranded DNA binding protein, putative |
| 895 | AAEL013943 | mediator complex, 100 kD-subunit, putative |
| 896 | AAEL005976 | adenine phosphoribosyltransferase, putative |
| 897 | AAEL001838 | conserved hypothetical protein |
| 898 | AAEL000425 | conserved hypothetical protein |
| 899 | AAEL015060 | Rad51A protein, putative |
| 900 | AAEL015658 | conserved hypothetical protein |
| 901 | AAEL004086 | aldo-keto reductase |
| 902 | AAEL009701 | conserved hypothetical protein |
| 903 | AAEL011362 | hypothetical protein |
| 904 | AAEL007395 | conserved hypothetical protein |
| 905 | AAEL007564 | zinc finger protein |
| 906 | AAEL002888 | williams-beuren syndrome critical region protein |
| 907 | AAEL012771 | leucine-rich immune protein (Coil-less) |
| 908 | AAEL009149 | kinectin, putative |
| 909 | AAEL009425 | hypothetical protein |
| 910 | AAEL012938 | zinc finger protein |
| 911 | AAEL005719 | cleavage stimulation factor |
| 912 | AAEL013844 | diazepam binding inhibitor, putative |
| 913 | AAEL006787 | conserved hypothetical protein |
| 914 | AAEL006948 | tomosyn |
| 915 | AAEL004335 | secreted ferritin G subunit precursor, putative |
| 916 | AAEL014438 | juvenile hormone-inducible protein, putative |
| 917 | AAEL011606 | conserved hypothetical protein |
| 918 | AAEL008486 | protein kinase C inhibitor, putative |
| 919 | AAEL006628 | conserved hypothetical protein |
| 920 | AAEL000065 | conserved hypothetical protein |
| 921 | AAEL005297 | guanine nucleotide exchange factor |
| 922 | AAEL013338 | lethal(2)essential for life protein, l2efl |
| 923 | AAEL015636 | interleukin enhancer binding factor |
| 924 | AAEL010472 | helix-loop-helix protein hen |
| 925 | AAEL002950 | conserved hypothetical protein |
| 926 | AAEL005395 | conserved hypothetical protein |
| 927 | AAEL000629 | adenylate kinase 3, |
| 928 | AAEL004004 | chromatin regulatory protein sir2 |
| 929 | AAEL011816 | conserved hypothetical protein |
| 930 | AAEL002399 | aspartate aminotransferase |
| 931 | AAEL006203 | juvenile hormone-inducible protein, putative |
| 932 | AAEL015017 | islet cell autoantigen |
| 933 | AAEL013644 | ubiquitously transcribed sex (x/y) chromosome |
| | | tetratricopeptide repeat protein |
| 934 | AAEL006965 | NBP2b protein, putative |
| 935 | AAEL004566 | myo inositol monophosphatase |
| 936 | AAEL012939 | gamma-subunit,methylmalonyl-CoA decarboxylase, |
| | | putative |
| 937 | AAEL001703 | serine-type enodpeptidase, |
| 938 | AAEL002273 | trypsin, putative |
| 939 | AAEL010951 | glutamate decarboxylase |
| 940 | AAEL007363 | leucine-rich transmembrane protein |
| 941 | AAEL007613 | Toll-like receptor |
| 942 | AAEL002166 | leucine rich repeat (in flii) interacting protein |
| 943 | AAEL002206 | rap GTPase-activating protein |
| 944 | AAEL005832 | programmed cell death |
| 945 | AAEL000709 | TOLL pathway signaling. |
| 946 | AAEL003119 | C-Type Lectin (CTL). |
| 947 | AAEL014989 | peptidoglycan recognition protein-1, putative |
| 948 | AAEL014356 | C-Type Lectin (CTL) - selectin like. |
| 949 | AAEL003554 | leucine rich repeat protein |
| 950 | AAEL001914 | scavenger receptor, putative |
| 951 | AAEL006702 | fibrinogen and fibronectin |
| 952 | AAEL006699 | fibrinogen and fibronectin |
| 953 | AAEL011764 | prophenoloxidase |
| 954 | AAEL006137 | Serine Protease Inhibitor (serpin) homologue - |
| | | unlikely to be inhibitory. |
| 955 | AAEL009420 | Class B Scavenger Receptor (CD36 domain). |
| 956 | AAEL013417 | fibrinogen and fibronectin |
| 957 | AAEL000533 | C-Type Lectin (CTL). |
| 958 | AAEL002354 | heme peroxidase |
| 959 | AAEL002704 | Serine Protease Inhibitor (serpin) homologue |
| 960 | AAEL000633 | Toll-like receptor |
| 961 | AAEL008681 | C-Type Lectin (CTL). |
| 962 | AAEL009551 | Toll-like receptor |
| 963 | AAEL009176 | Gram-Negative Binding Protein (GNBP) or Beta-1 3- |
| | | Glucan Binding Protein (BGBP). |
| 964 | AAEL007768 | TOLL pathway signaling. |
| 965 | AAEL000227 | Class B Scavenger Receptor (CD36 domain). |
| 966 | AAEL001163 | macroglobulin/complement |
| 967 | AAEL009474 | Peptidoglycan Recognition Protein (Short) |
| 968 | AAEL011009 | fibrinogen and fibronectin |
| 969 | AAEL009384 | fibrinogen and fibronectin |
| 970 | AAEL005800 | Clip-Domain Serine Protease family E. Protease |
| | | homologue. |
| 971 | AAEL007107 | serine protease, putative |
| 972 | AAEL002601 | Clip-Domain Serine Protease family A. Protease |
| | | homologue. |
| 973 | AAEL007626 | Gram-Negative Binding Protein (GNBP) or Beta-1 3- |
| | | Glucan Binding Protein (BGBP). |
| 974 | AAEL003632 | Clip-Domain Serine Protease family B. |
| 975 | AAEL006161 | Clip-Domain Serine Protease family B. |
| 976 | AAEL003857 | defensin anti-microbial peptide |
| 977 | AAEL004868 | hemomucin |
| 978 | AAEL009842 | galectin |
| 979 | AAEL014246 | glucosyl/glucuronosyl transferases |
| 980 | AAEL002688 | glucosyl/glucuronosyl transferases |
| 981 | AAEL013128 | elongase, putative |
| 982 | AAEL014664 | AMP dependent coa ligase |
| 983 | AAEL001273 | Sec24B protein, putative |
| 984 | AAEL013458 | glutamine synthetase 1, 2 (glutamate- ammonia ligase) (gs) |
| 985 | AAEL010256 | E3 ubiquitin ligase |
| 986 | AAEL006687 | exportin |
| 987 | AAEL014871 | methylenetetrahydrofolate dehydrogenase |
| 988 | AAEL002430 | n-acetylglucosamine-6-phosphate deacetylase |
| 989 | AAEL010751 | methylenetetrahydrofolate dehydrogenase |
| 990 | AAEL004952 | protein N-terminal asparagine amidohydrolase, putative |
| 991 | AAEL008374 | E3 ubiquitin-protein ligase nedd-4 |
| 992 | AAEL008687 | tar RNA binding protein (trbp) |
| 993 | AAEL004294 | dihydrolipoamide acetyltransferase component |
| | | of pyruvate dehydrogenase |
| 994 | AAEL005763 | lysosomal alpha-mannosidase (mannosidase |
| | | alpha class 2b member 1) |
| 995 | AAEL008507 | srpk |
| 996 | AAEL001593 | glycerol-3-phosphate dehydrogenase |
| 997 | AAEL004865 | cyclin g |
| 998 | AAEL003402 | sphingomyelin phosphodiesterase |
| 999 | AAEL003091 | glucosyl/glucuronosyl transferases |
| 1000 | AAEL008393 | phosphatidylserine synthase |
| 1001 | AAEL001523 | secretory Phospholipase A2, putative |
| 1002 | AAEL014965 | nova |
| 1003 | AAEL005380 | mixed-lineage leukemia protein, mll |
| 1004 | AAEL003873 | glycerol-3-phosphate dehydrogenase |
| 1005 | AAEL004757 | cleavage and polyadenylation specificity factor |
| 1006 | AAEL002528 | histone deacetylase |
| 1007 | AAEL000690 | steroid dehydrogenase |
| 1008 | AAEL011957 | elongase, putative |
| 1009 | AAEL012446 | Inhibitor of Apoptosis (IAP) containing Baculoviral IAP |
| | | Repeat(s) (BIR domains). |
| 1010 | AAEL000006 | phosphoenolpyruvate carboxykinase |
| 1011 | AAEL013525 | Timp-3, putative |
| 1012 | AAEL002658 | AMP dependent ligase |
| 1013 | AAEL013831 | pyrroline-5-carboxylate dehydrogenase |
| 1014 | AAEL002542 | triosephosphate isomerase |
| 1015 | AAEL012014 | l-lactate dehydrogenase |
| 1016 | AAEL012418 | deoxyribonuclease ii |
| 1017 | AAEL009237 | glycoside hydrolases |
| 1018 | AAEL012994 | glucose-6-phosphate isomerase |
| 1019 | AAEL012455 | alcohol dehydrogenase |
| 1020 | AAEL015020 | glycoside hydrolases |
| 1021 | AAEL004778 | acyl-coa dehydrogenase |
| 1022 | AAEL008865 | oligoribonuclease, mitochondrial |
| 1023 | AAEL007893 | short chain type dehydrogenase |
| 1024 | AAEL014139 | proacrosin, putative |
| 1025 | AAEL008668 | Clip-Domain Serine Protease family B. |
| 1026 | AAEL008124 | possible RNA methyltransferase, putative |
| 1027 | AAEL014353 | conserved hypothetical protein |
| 1028 | AAEL003026 | regulator of g protein signaling |
| 1029 | AAEL002663 | kuzbanian |
| 1030 | AAEL008202 | serine-type enodpeptidase, |
| 1031 | AAEL004138 | signal peptide peptidase |
| 1032 | AAEL004980 | conserved hypothetical protein |
| 1033 | AAEL003733 | hypothetical protein |
| 1034 | AAEL001540 | ubiquitin specific protease |
| 1035 | AAEL003965 | calpain 4, 6, 7, invertebrate |
| 1036 | AAEL006542 | retinoid-inducible serine carboxypeptidase (serine |
| | | carboxypeptidase |
| 1037 | AAEL013605 | hypothetical protein |
| 1038 | AAEL005107 | hypothetical protein |
| 1039 | AAEL015272 | zinc carboxypeptidase |
| 1040 | AAEL008769 | serine-type enodpeptidase, |
| 1041 | AAEL003967 | calpain 4, 6, 7, invertebrate |
| 1042 | AAEL010989 | hypothetical protein |
| 1043 | AAEL005342 | conserved hypothetical protein |
| 1044 | AAEL011850 | cytochrome P450 |
| 1045 | AAEL006386 | mitochondrial 39S ribosomal protein L39 |
| 1046 | AAEL010226 | daughterless |
| 1047 | AAEL004589 | small calcium-binding mitochondrial carrier, putative |
| 1048 | AAEL014608 | cytochrome P450 |
| 1049 | AAEL007235 | mitochondrial uncoupling protein |
| 1050 | AAEL003215 | heat shock factor binding protein, putative |
| 1051 | AAEL010546 | heat shock factor binding protein, putative |
| 1052 | AAEL000895 | peroxisome biogenesis factor 1 (peroxin-1) |
| 1053 | AAEL001024 | mitochondrial carrier protein |
| 1054 | AAEL006318 | short-chain dehydrogenase |
| 1055 | AAEL013350 | heat shock protein 26 kD, putative |
| 1056 | AAEL007046 | mitochondrial brown fat uncoupling protein |
| 1057 | AAEL010372 | aldehyde oxidase |
| 1058 | AAEL013693 | excision repair cross-complementing 1 ercc1 |
| 1059 | AAEL012308 | hypothetical protein |
| 1060 | AAEL003195 | Carboxy/choline esterase Alpha Esterase |
| 1061 | AAEL010677 | oxidoreductase |
| 1062 | AAEL010380 | aldehyde oxidase |
| 1063 | AAEL002523 | mitochondrial inner membrane protein translocase, 9 kD- |
| | | subunit, putative |
| 1064 | AAEL002486 | mitochondrial inner membrane protein translocase, 9 kD- |
| | | subunit, putative |
| 1065 | AAEL004829 | NADH dehydrogenase, putative |
| 1066 | AAEL011752 | glutathione transferase |
| 1067 | AAEL006984 | cytochrome P450 |
| 1068 | AAEL007355 | mitochondrial ribosomal protein, S18A, putative |
| 1069 | AAEL003770 | conserved hypothetical protein |
| 1070 | AAEL002783 | mitochondrial ribosomal protein, L37, putative |
| 1071 | AAEL004450 | cytochrome b5, putative |
| 1072 | AAEL008601 | mitochondrial ribosomal protein, L28, putative |
| 1073 | AAEL007946 | glutathione transferase |
| 1074 | AAEL013790 | mitochondrial ribosomal protein, L50, putative |
| 1075 | AAEL005113 | Carboxy/choline esterase Alpha Esterase |
| 1076 | AAEL004716 | chromodomain helicase DNA binding protein |
| 1077 | AAEL007923 | eukaryotic translation initiation factor 4 gamma |
| 1078 | AAEL010467 | heterogeneous nuclear ribonucleoprotein |
| 1079 | AAEL004119 | ribonuclease p/mrp subunit |
| 1080 | AAEL013653 | tata-box binding protein |
| 1081 | AAEL010222 | transcription factor GATA-4 (GATA binding factor-4) |
| 1082 | AAEL015263 | RNA and export factor binding protein |
| 1083 | AAEL002853 | ccaat/enhancer binding protein |
| 1084 | AAEL003800 | hypothetical protein |
| 1085 | AAEL002551 | DNA topoisomerase type I |
| 1086 | AAEL008738 | DEAD box ATP-dependent RNA helicase |
| 1087 | AAEL000193 | histone-lysine n-methyltransferase |
| 1088 | AAEL001912 | forkhead protein/forkhead protein domain |
| 1089 | AAEL002359 | homeobox protein onecut |
| 1090 | AAEL006473 | arginine/serine-rich splicing factor |
| 1091 | AAEL007801 | exonuclease |
| 1092 | AAEL003985 | small nuclear ribonucleoprotein, core, putative |
| 1093 | AAEL010642 | poly (A)-binding protein, putative |
| 1094 | AAEL001280 | 28S ribosomal protein S15, mitochondrial precursor |
| 1095 | AAEL015236 | signal recognition particle, 9 kD-subunit, putative |
| 1096 | AAEL015045 | transcription factor IIIA, putative |
| 1097 | AAEL001363 | small nuclear ribonucleoprotein Sm D1, putative |
| 1098 | AAEL005888 | DNA polymerase theta |
| 1099 | AAEL007885 | translation initiation factor-3 (IF3), putative |
| 1100 | AAEL006582 | calcium-transporting ATPase sarcoplasmic/endoplasmic |
| | | reticulum type |
| 1101 | AAEL005392 | dihydropyridine-sensitive l-type calcium channel |
| 1102 | AAEL003393 | ATP synthase beta subunit |
| 1103 | AAEL008928 | inward-rectifying potassium channel |
| 1104 | AAEL010361 | rer1 protein |
| 1105 | AAEL005043 | ATP-dependent bile acid permease |
| 1106 | AAEL010470 | calcineurin b subunit |
| 1107 | AAEL004141 | phosphatidylinositol transfer protein/retinal degeneration b |
| | | protein |
| 1108 | AAEL011657 | importin alpha |
| 1109 | AAEL007971 | tyrosine transporter |
| 1110 | AAEL009088 | liquid facets |
| 1111 | AAEL000567 | Facilitated trehalose transporter Tret1 |
| 1112 | AAEL003789 | exportin, putative |
| 1113 | AAEL010608 | succinate dehydrogenase |
| 1114 | AAEL013704 | beta-arrestin 1, |
| 1115 | AAEL013614 | clathrin heavy chain |
| 1116 | AAEL002061 | cation-transporting ATPase 13a1 (g-box binding protein) |
| 1117 | AAEL000417 | monocarboxylate transporter |
| 1118 | AAEL004743 | multidrug resistance protein 2 (ATP-binding |
| | | cassette protein c) |
| 1119 | AAEL002412 | monocarboxylate transporter |
| 1120 | AAEL008587 | glutamate receptor, ionotropic, N-methyl d-aspartate |
| 1121 | AAEL010481 | sugar transporter |
| 1122 | AAEL006047 | histamine-gated chloride channel subunit |
| 1123 | AAEL010823 | ATP synthase delta chain |
| 1124 | AAEL004025 | glucose dehydrogenase |
| 1125 | AAEL003626 | sodium/chloride dependent amino acid transporter |
| 1126 | AAEL005859 | amino acid transporter |
| 1127 | AAEL000435 | THO complex, putative |
| 1128 | AAEL004620 | sorting nexin |
| 1129 | AAEL011423 | sugar transporter |
| 1130 | AAEL013215 | sulfonylurea receptor/ABC transporter |
| 1131 | AAEL001313 | conserved hypothetical protein |
| 1132 | AAEL003025 | hypothetical protein |
| 1133 | AAEL004447 | hypothetical protein |
| 1134 | AAEL004149 | hypothetical protein |
| 1135 | AAEL011064 | hypothetical protein |
| 1136 | AAEL002757 | hypothetical protein |
| 1137 | AAEL009776 | conserved hypothetical protein |
| 1138 | AAEL002835 | conserved hypothetical protein |
| 1139 | AAEL014693 | conserved hypothetical protein |
| 1140 | AAEL012203 | conserved hypothetical protein |
| 1141 | AAEL005867 | conserved hypothetical protein |
| 1142 | AAEL007539 | hypothetical protein |
| 1143 | AAEL001409 | conserved hypothetical protein |
| 1144 | AAEL002963 | conserved hypothetical protein |
| 1145 | AAEL010308 | hypothetical protein |
| 1146 | AAEL009386 | hypothetical protein |
| 1147 | AAEL011153 | hypothetical protein |
| 1148 | AAEL006863 | hypothetical protein |
| 1149 | AAEL001786 | hypothetical protein |
| 1150 | AAEL007606 | hypothetical protein |
| 1151 | AAEL007242 | conserved hypothetical protein |
| 1152 | AAEL008054 | conserved hypothetical protein |
| 1153 | AAEL014415 | conserved hypothetical protein |
| 1154 | AAEL011703 | conserved hypothetical protein |
| 1155 | AAEL002169 | conserved hypothetical protein |
| 1156 | AAEL002168 | conserved hypothetical protein |
| 1157 | AAEL010445 | hypothetical protein |
| 1158 | AAEL004583 | conserved hypothetical protein |
| 1159 | AAEL003373 | hypothetical protein |
| 1160 | AAEL005843 | conserved hypothetical protein |
| 1161 | AAEL012302 | conserved hypothetical protein |
| 1162 | AAEL012293 | conserved hypothetical protein |
| 1163 | AAEL007817 | hypothetical protein |
| 1164 | AAEL002327 | hypothetical protein |
| 1165 | AAEL010015 | hypothetical protein |
| 1166 | AAEL004800 | hypothetical protein |
| 1167 | AAEL013800 | conserved hypothetical protein |
| 1168 | AAEL007454 | conserved hypothetical protein |
| 1169 | AAEL001581 | conserved hypothetical protein |
| 1170 | AAEL001376 | hypothetical protein |
| 1171 | AAEL004854 | conserved hypothetical protein |
| 1172 | AAEL007015 | conserved hypothetical protein |
| 1173 | AAEL000258 | conserved hypothetical protein |
| 1174 | AAEL002543 | conserved hypothetical protein |
| 1175 | AAEL006520 | hypothetical protein |
| 1176 | AAEL006275 | conserved hypothetical protein |
| 1177 | AAEL014294 | conserved hypothetical protein |
| 1178 | AAEL014022 | conserved hypothetical protein |
| 1179 | AAEL004832 | conserved hypothetical protein |
| 1180 | AAEL000316 | hypothetical protein |
| 1181 | AAEL012754 | hypothetical protein |
| 1182 | AAEL005007 | hypothetical protein |
| 1183 | AAEL009163 | conserved hypothetical protein |
| 1184 | AAEL001495 | conserved hypothetical protein |
| 1185 | AAEL004934 | hypothetical protein |
| 1186 | AAEL007071 | conserved hypothetical protein |
| 1187 | AAEL004363 | conserved hypothetical protein |
| 1188 | AAEL007433 | conserved hypothetical protein |
| 1189 | AAEL010025 | conserved hypothetical protein |
| 1190 | AAEL002984 | hypothetical protein |
| 1191 | AAEL003126 | conserved hypothetical protein |
| 1192 | AAEL008154 | hypothetical protein |
| 1193 | AAEL000649 | conserved hypothetical protein |
| 1194 | AAEL013724 | conserved hypothetical protein |
| 1195 | AAEL012854 | hypothetical protein |
| 1196 | AAEL012858 | hypothetical protein |
| 1197 | AAEL014950 | spaetzle-like cytokine |
| 1198 | AAEL011066 | hypothetical protein |
| 1199 | AAEL009896 | hypothetical protein |
| 1200 | AAEL001727 | hypothetical protein |
| 1201 | AAEL001921 | hypothetical protein |
| 1202 | AAEL012396 | conserved hypothetical protein |
| 1203 | AAEL005233 | hypothetical protein |
| 1204 | AAEL015446 | conserved hypothetical protein |
| 1205 | AAEL007550 | conserved hypothetical protein |
| 1206 | AAEL011886 | hypothetical protein |
| 1207 | AAEL006761 | hypothetical protein |
| 1208 | AAEL003778 | conserved hypothetical protein |
| 1209 | AAEL002931 | hypothetical protein |
| 1210 | AAEL013303 | conserved hypothetical protein |
| 1211 | AAEL007414 | conserved hypothetical protein |
| 1212 | AAEL003693 | hypothetical protein |
| 1213 | AAEL010150 | conserved hypothetical protein |
| 1214 | AAEL004498 | hypothetical protein |
| 1215 | AAEL011598 | hypothetical protein |
| 1216 | AAEL003798 | hypothetical protein |
| 1217 | AAEL010746 | hypothetical protein |
| 1218 | AAEL011266 | hypothetical protein |
| 1219 | AAEL001271 | conserved hypothetical protein |
| 1220 | AAEL005193 | hypothetical protein |
| 1221 | AAEL007805 | hypothetical protein |
| 1222 | AAEL013304 | conserved hypothetical protein |
| 1223 | AAEL008142 | hypothetical protein |
| 1224 | AAEL009322 | hypothetical protein |
| 1225 | AAEL004018 | conserved hypothetical protein |
| 1226 | AAEL006606 | hypothetical protein |
| 1227 | AAEL007437 | conserved hypothetical protein |
| 1228 | AAEL013684 | conserved hypothetical protein |
| 1229 | AAEL007751 | predicted protein |
| 1230 | AAEL005623 | hypothetical protein |
| 1231 | AAEL006896 | hypothetical protein |
| 1232 | AAEL003190 | hypothetical protein |
| 1233 | AAEL007886 | hypothetical protein |
| 1234 | AAEL004943 | conserved hypothetical protein |
| 1235 | AAEL004561 | conserved hypothetical protein |
| 1236 | AAEL005264 | hypothetical protein |
| 1237 | AAEL011330 | conserved hypothetical protein |
| 1238 | AAEL000186 | conserved hypothetical protein |
| 1239 | AAEL012931 | conserved hypothetical protein |
| 1240 | AAEL000561 | hypothetical protein |
| 1241 | AAEL002921 | conserved hypothetical protein |
| 1242 | AAEL001162 | conserved hypothetical protein |
| 1243 | AAEL012361 | conserved hypothetical protein |
| 1244 | AAEL013426 | hypothetical protein |
| 1245 | AAEL013935 | conserved hypothetical protein |
| 1246 | AAEL003264 | conserved hypothetical protein |
| 1247 | AAEL005972 | hypothetical protein |
| 1248 | AAEL008680 | Ubiquitin-related modifier 1 homolog |
| 1249 | AAEL003088 | hypothetical protein |
| 1250 | AAEL009270 | hypothetical protein |
| 1251 | AAEL012878 | hypothetical protein |
| 1252 | AAEL013895 | conserved hypothetical protein |
| 1253 | AAEL003816 | hypothetical protein |
| 1254 | AAEL011636 | hypothetical protein |
| 1255 | AAEL004775 | conserved hypothetical protein |
| 1256 | AAEL006225 | conserved hypothetical protein |
| 1257 | AAEL009892 | conserved hypothetical protein |
| 1258 | AAEL011640 | hypothetical protein |
| 1259 | AAEL009767 | conserved hypothetical protein |
| 1260 | AAEL003113 | conserved hypothetical protein |
| 1261 | AAEL008557 | conserved hypothetical protein |
| 1262 | AAEL002856 | conserved hypothetical protein |
| 1263 | AAEL004250 | conserved hypothetical protein |
| 1264 | AAEL003451 | conserved hypothetical protein |
| 1265 | AAEL010249 | conserved hypothetical protein |
| 1266 | AAEL014937 | hypothetical protein |
| 1267 | AAEL004552 | conserved hypothetical protein |
| 1268 | AAEL005000 | conserved hypothetical protein |
| 1269 | AAEL010768 | conserved hypothetical protein |
| 1270 | AAEL004960 | hypothetical protein |
| 1271 | AAEL003822 | conserved hypothetical protein |
| 1272 | AAEL004473 | conserved hypothetical protein |
| 1273 | AAEL009952 | hypothetical protein |
| 1274 | AAEL002109 | conserved hypothetical protein |
| 1275 | AAEL007849 | conserved hypothetical protein |
| 1276 | AAEL010507 | hypothetical protein |
| 1277 | AAEL015340 | hypothetical protein |
| 1278 | AAEL013725 | conserved hypothetical protein |
| 1279 | AAEL000526 | conserved hypothetical protein |
| 1280 | AAEL010770 | hypothetical protein |
| 1281 | AAEL015507 | conserved hypothetical protein |
| 1282 | AAEL001573 | conserved hypothetical protein |
| 1283 | AAEL007045 | conserved hypothetical protein |
| 1284 | AAEL008403 | conserved hypothetical protein |
| 1285 | AAEL007859 | conserved hypothetical protein |
| 1286 | AAEL011635 | conserved hypothetical protein |
| 1287 | AAEL008059 | conserved hypothetical protein |
| 1288 | AAEL014633 | conserved hypothetical protein |
| 1289 | AAEL011119 | hypothetical protein |
| 1290 | AAEL005640 | conserved hypothetical protein |
| 1291 | AAEL013740 | hypothetical protein |
| 1292 | AAEL009440 | conserved hypothetical protein |
| 1293 | AAEL002087 | conserved hypothetical protein |
| 1294 | AAEL008436 | conserved hypothetical protein |
| 1325 | AAEL007698 | |
| | (AuB) | |
| 1326 | AAEL003832 | |
| 1327 | AAEL007562 | |
| 1328 | AAEL010179 | |
| 1329 | AAEL000598 | |

[0126] Homologs and orthologs of gene symbols GNBPA2, GNBPB4, GNBPB6, CLIPB13B, SPZ5, PGRPLD, SOCS, SOCS16D, SOCS44A, SUMO, CECG, GAM, LYSC, DOME, HOP, STAT, REL1A and CTLMA12 are also contemplated in accordance with the present teachings.

[0127] In some embodiments, the pathogen resistance gene products include, but are not limited to sequences of AAEL000652, AAEL009178, AAEL003253, AAEL006936, AAEL000393, AAEL006794, AAEL011455, AAEL015312 or AAEL001702 or their corresponding homologs and orthologs.

[0128] According to one embodiment, the pathogen resistance gene product that is downregulated is as set forth in SEQ ID NO: 3, 5, 31, 98, 102, 122, 271, 291 or 299.

[0129] According to one embodiment, the pathogen resistance gene is selected from the group consisting of AAEL007768 (MyD88), AAEL000709 (Cactus), AAEL007698 (AuB), AAEL003832, AAEL007562, Rel1A (AAEL007696), AAEL000598 and AAEL010179.

[0130] According to one embodiment, pathogen resistance gene is selected from the group consisting of SEQ ID NOs: 964, 945, 1325, 1326, 1327, 1328 and 1329.

[0131] It will be appreciated that more than one gene may be targeted in order to maximize the cytotoxic effect on the mosquitoes.

[0132] As used herein, the term “downregulates an expression” or “downregulating expression” refers to causing, directly or indirectly, reduction in the transcription of a desired gene, reduction in the amount, stability or translatability of transcription products (e.g. RNA) of the gene, and/or reduction in translation of the polypeptide(s) encoded by the desired gene.

[0133] Downregulating expression of a pathogen resistance gene product of a mosquito can be monitored, for example, by direct detection of gene transcripts (for example, by PCR), by detection of polypeptide(s) encoded by the gene (for example, by Western blot or immunoprecipitation), by detection of biological activity of polypeptides encode by the gene (for example, catalytic activity, ligand binding, and the like), or by monitoring changes in the mosquitoes (for example, reduced motility of the mosquito etc). Additionally or alternatively downregulating expression of a pathogen resistance gene product may be monitored by measuring pathogen levels (e.g. viral levels, bacterial levels etc.) in the mosquitoes as compared to wild type (i.e. control) mosquitoes not treated by the agents of the invention.

[0134] Thus, according to some aspects of the invention there is provided an isolated nucleic acid agent comprising a nucleic acid sequence which specifically downregulates the expression of at least one mosquito pathogen resistance gene product.

[0135] According to one embodiment, the agent is a polynucleotide agent, such as an RNA silencing agent.

[0136] As used herein, the term “RNA silencing agent” refers to an RNA which is capable of inhibiting or “silencing” the expression of a target gene. In certain embodiments, the RNA silencing agent is capable of preventing complete processing (e.g, the full translation and/or expression) of an mRNA molecule through a post-transcriptional silencing mechanism. RNA silencing agents include noncoding RNA molecules, for example RNA duplexes comprising paired strands, as well as precursor RNAs from which such small non-coding RNAs can be generated. Exemplary RNA silencing agents include dsRNAs such as siRNAs, miRNAs and shRNAs. In one embodiment, the RNA silencing agent is capable of inducing RNA interference. In another embodiment, the RNA silencing agent is capable of mediating translational repression.

[0137] In some embodiments of the invention, the nucleic acid agent is a double stranded RNA (dsRNA). As used herein the term “dsRNA” relates to two strands of anti-parallel polyribonucleic acids held together by base pairing. The two strands can be of identical length or of different lengths provided there is enough sequence homology between the two strands that a double stranded structure is formed with at least 80%, 90%, 95% or 100% complementarity over the entire length. According to an embodiment of the invention, there are no overhangs for the dsRNA molecule. According to another embodiment of the invention, the dsRNA molecule comprises overhangs. According to other embodiments, the strands are aligned such that there are at least 1, 2, or 3 bases at the end of the strands which do not align (i.e., for which no complementary bases occur in the opposing strand) such that an overhang of 1, 2 or 3 residues occurs at one or both ends of the duplex when strands are annealed.

[0138] It will be noted that the dsRNA can be defined in terms of the nucleic acid sequence of the DNA encoding the target gene transcript, and it is understood that a dsRNA sequence corresponding to the coding sequence of a gene comprises an RNA complement of the gene's coding sequence, or other sequence of the gene which is transcribed into RNA.

[0139] The inhibitory RNA sequence can be greater than 90% identical, or even 100% identical, to the portion of the target gene transcript. Alternatively, the duplex region of the RNA may be defined functionally as a nucleotide sequence that is capable of hybridizing with a portion of the target gene transcript under stringent conditions (e.g., 400 mM NaCl, 40 mM PIPES pH 6.4, 1 mM EDTA, 60 degrees C. hybridization for 12-16 hours; followed by washing). The length of the double-stranded nucleotide sequences complementary to the target gene transcript may be at least about 18, 19, 21, 25, 50, 100, 200, 300, 400, 491, 500, 550, 600, 650, 700, 750, 800, 900, 1000 or more bases. In some embodiments of the invention, the length of the double-stranded nucleotide sequence is approximately from about 18 to about 1000, about 18 to about 750, about 18 to about 510, about 18 to about 400, about 18 to about 250 nucleotides in length.

[0140] The term “corresponds to” as used herein means a polynucleotide sequence homologous to all or a portion of a reference polynucleotide sequence. In contradistinction, the term “complementary to” is used herein to mean that the complementary sequence is homologous to all or a portion of a reference polynucleotide sequence. For example, the nucleotide sequence “TATAC” corresponds to a reference sequence “TATAC” and is complementary to a reference sequence “GTATA”.

[0141] The present teachings relate to various lengths of dsRNA, whereby the shorter version i.e., x is shorter or equals 50 bp (e.g., 17-50), is referred to as siRNA or miRNA. Longer dsRNA molecules of 51-600 are referred to herein as dsRNA, which can be further processed for siRNA molecules. According to some embodiments, the nucleic acid sequence of the dsRNA is greater than 15 base pairs in length. According to yet other embodiments, the nucleic acid sequence of the dsRNA is 19-25 base pairs in length, 30-100 base pairs in length, 100-250 base pairs in length or 100-500 base pairs in length. According to still other embodiments, the dsRNA is 500-800 base pairs in length, 700-800 base pairs in length, 300-600 base pairs in length, 350-500 base pairs in length or 400-450 base pairs in length. In some embodiments, the dsRNA is 400 base pairs in length. In some embodiments, the dsRNA is 750 base pairs in length.

[0142] The term “siRNA” refers to small inhibitory RNA duplexes (generally between 17-30 basepairs, but also longer e.g., 31-50 bp) that induce the RNA interference (RNAi) pathway. Typically, siRNAs are chemically synthesized as 21mers with a central 19 bp duplex region and symmetric 2-base 3′-overhangs on the termini, although it has been recently described that chemically synthesized RNA duplexes of 25-30 base length can have as much as a 100-fold increase in potency compared with 21mers at the same location. The observed increased potency obtained using longer RNAs in triggering RNAi is theorized to result from providing Dicer with a substrate (27mer) instead of a product (21mer) and that this improves the rate or efficiency of entry of the siRNA duplex into RISC.

[0143] It has been found that position of the 3′-overhang influences potency of a siRNA and asymmetric duplexes having a 3′-overhang on the antisense strand are generally more potent than those with the 3′-overhang on the sense strand (Rose et al., 2005). This can be attributed to asymmetrical strand loading into RISC, as the opposite efficacy patterns are observed when targeting the antisense transcript.

[0144] The strands of a double-stranded interfering RNA (e.g., a siRNA) may be connected to form a hairpin or stem-loop structure (e.g., a shRNA). Thus, as mentioned the RNA silencing agent of some embodiments of the invention may also be a short hairpin RNA (shRNA).

[0145] The term “shRNA”, as used herein, refers to an RNA agent having a stem-loop structure, comprising a first and second region of complementary sequence, the degree of complementarity and orientation of the regions being sufficient such that base pairing occurs between the regions, the first and second regions being joined by a loop region, the loop resulting from a lack of base pairing between nucleotides (or nucleotide analogs) within the loop region. The number of nucleotides in the loop is a number between and including 3 to 23, or 5 to 15, or 7 to 13, or 4 to 9, or 9 to 11. Some of the nucleotides in the loop can be involved in base-pair interactions with other nucleotides in the loop. Examples of oligonucleotide sequences that can be used to form the loop include 5′-UUCAAGAGA-3′ (Brummelkamp, T. R. et al. (2002) Science 296: 550, SEQ ID NO: 302) and 5′-UUUGUGUAG-3′ (Castanotto, D. et al. (2002) RNA 8:1454, SEQ ID NO: 303). It will be recognized by one of skill in the art that the resulting single chain oligonucleotide forms a stem-loop or hairpin structure comprising a double-stranded region capable of interacting with the RNAi machinery.

[0146] As used herein, the phrase “microRNA (also referred to herein interchangeably as “miRNA” or “miR”) or a precursor thereof” refers to a microRNA (miRNA) molecule acting as a post-transcriptional regulator. Typically, the miRNA molecules are RNA molecules of about 20 to 22 nucleotides in length which can be loaded into a RISC complex and which direct the cleavage of another RNA molecule, wherein the other RNA molecule comprises a nucleotide sequence essentially complementary to the nucleotide sequence of the miRNA molecule.

[0147] Typically, a miRNA molecule is processed from a “pre-miRNA” or as used herein a precursor of a pre-miRNA molecule by proteins, such as DCL proteins, and loaded onto a RISC complex where it can guide the cleavage of the target RNA molecules.

[0148] Pre-microRNA molecules are typically processed from pri-microRNA molecules (primary transcripts). The single stranded RNA segments flanking the pre-microRNA are important for processing of the pri-miRNA into the pre-miRNA. The cleavage site appears to be determined by the distance from the stem-ssRNA junction (Han et al. 2006, Cell 125, 887-901, 887-901).

[0149] As used herein, a “pre-miRNA” molecule is an RNA molecule of about 100 to about 200 nucleotides, preferably about 100 to about 130 nucleotides which can adopt a secondary structure comprising an imperfect double stranded RNA stem and a single stranded RNA loop (also referred to as “hairpin”) and further comprising the nucleotide sequence of the miRNA (and its complement sequence) in the double stranded RNA stem. According to a specific embodiment, the miRNA and its complement are located about 10 to about 20 nucleotides from the free ends of the miRNA double stranded RNA stem. The length and sequence of the single stranded loop region are not critical and may vary considerably, e.g. between 30 and 50 nucleotides in length. The complementarity between the miRNA and its complement need not be perfect and about 1 to 3 bulges of unpaired nucleotides can be tolerated. The secondary structure adopted by an RNA molecule can be predicted by computer algorithms conventional in the art such as mFOLD. The particular strand of the double stranded RNA stem from the pre-miRNA which is released by DCL activity and loaded onto the RISC complex is determined by the degree of complementarity at the 5′ end, whereby the strand which at its 5′ end is the least involved in hydrogen bounding between the nucleotides of the different strands of the cleaved dsRNA stem is loaded onto the RISC complex and will determine the sequence specificity of the target RNA molecule degradation. However, if empirically the miRNA molecule from a particular synthetic pre-miRNA molecule is not functional (because the “wrong” strand is loaded on the RISC complex), it will be immediately evident that this problem can be solved by exchanging the position of the miRNA molecule and its complement on the respective strands of the dsRNA stem of the pre-miRNA molecule. As is known in the art, binding between A and U involving two hydrogen bounds, or G and U involving two hydrogen bounds is less strong that between G and C involving three hydrogen bounds.

[0150] Naturally occurring miRNA molecules may be comprised within their naturally occurring pre-miRNA molecules but they can also be introduced into existing pre-miRNA molecule scaffolds by exchanging the nucleotide sequence of the miRNA molecule normally processed from such existing pre-miRNA molecule for the nucleotide sequence of another miRNA of interest. The scaffold of the pre-miRNA can also be completely synthetic. Likewise, synthetic miRNA molecules may be comprised within, and processed from, existing pre-miRNA molecule scaffolds or synthetic pre-miRNA scaffolds. Some pre-miRNA scaffolds may be preferred over others for their efficiency to be correctly processed into the designed microRNAs, particularly when expressed as a chimeric gene wherein other DNA regions, such as untranslated leader sequences or transcription termination and polyadenylation regions are incorporated in the primary transcript in addition to the pre-microRNA.

[0151] According to the present teachings, the dsRNA molecules may be naturally occurring or synthetic.

[0152] The dsRNA can be a mixture of long and short dsRNA molecules such as, dsRNA, siRNA, siRNA+dsRNA, siRNA+miRNA, or a combination of same.

[0153] The nucleic acid agent is designed for specifically targeting a target gene of interest (e.g. a mosquito pathogen resistance gene). It will be appreciated that the nucleic acid agent can be used to downregulate one or more target genes (e.g. as described in detail above). If a number of target genes are targeted, a heterogenic composition which comprises a plurality of nucleic acid agents for targeting a number of target genes is used. Alternatively the plurality of nucleic acid agents is separately formulated. According to a specific embodiment, a number of distinct nucleic acid agent molecules for a single target are used, which may be used separately or simultaneously (i.e., co-formulation) applied.

[0154] For example, in order to silence the expression of an mRNA of interest, synthesis of the dsRNA suitable for use with some embodiments of the invention can be selected as follows. First, the mRNA sequence is scanned including the 3′ UTR and the 5′ UTR. Second, the mRNA sequence is compared to an appropriate genomic database using any sequence alignment software, such as the BLAST software available from the NCBI server (wwwdotncbidotnlmdotnihdotgov/BLAST/). Putative regions in the mRNA sequence which exhibit significant homology to other coding sequences are filtered out.

[0155] Qualifying target sequences are selected as template for dsRNA synthesis. Preferred sequences are those that have as little homology to other genes in the genome to reduce an “off-target” effect.

[0156] It will be appreciated that the RNA silencing agent of some embodiments of the invention need not be limited to those molecules containing only RNA, but further encompasses chemically-modified nucleotides and non-nucleotides.

[0157] According to one embodiment, the dsRNA specifically targets a gene selected from the group consisting of AAEL007768 (MyD88), AAEL000709 (Cactus), AAEL007698 (AuB), AAEL003832, AAEL007562, Rel1A (AAEL007696), AAEL000598 and AAEL010179.

[0158] According to one embodiment, the dsRNA is selected from the group consisting of SEQ ID NOs: 1315-1324 and 1330.

[0159] The dsRNA may be synthesized using any method known in the art, including either enzymatic syntheses or solid-phase syntheses. These are especially useful in the case of short polynucleotide sequences with or without modifications as explained above. Equipment and reagents for executing solid-phase synthesis are commercially available from, for example, Applied Biosystems. Any other means for such synthesis may also be employed; the actual synthesis of the oligonucleotides is well within the capabilities of one skilled in the art and can be accomplished via established methodologies as detailed in, for example: Sambrook, J. and Russell, D. W. (2001), “Molecular Cloning: A Laboratory Manual”; Ausubel, R. M. et al., eds. (1994, 1989), “Current Protocols in Molecular Biology,” Volumes I-III, John Wiley & Sons, Baltimore, Md.; Perbal, B. (1988), “A Practical Guide to Molecular Cloning,” John Wiley & Sons, New York; and Gait, M. J., ed. (1984), “Oligonucleotide Synthesis”; utilizing solid-phase chemistry, e.g. cyanoethyl phosphoramidite followed by deprotection, desalting, and purification by, for example, an automated trityl-on method or HPLC.

[0160] According to a specific embodiment, the nucleic acid agent is provided to the mosquito in a configuration devoid of a heterologous promoter for driving recombinant expression of the dsRNA (exogenous), rendering the nucleic acid molecule of the instant invention a naked molecule. The nucleic acid agent may still comprise modifications that may affect its stability and bioavailability (e.g., PNA).

[0161] The term “recombinant expression” refers to an expression from a nucleic acid construct.

[0162] As used herein “devoid of a heterologous promoter for driving expression of the dsRNA” means that the molecule doesn't include a cis-acting regulatory sequence (e.g., heterologous) transcribing the dsRNA. As used herein the term “heterologous” refers to exogenous, not-naturally occurring within a native cell of the mosquito or in a cell in which the dsRNA is fed to the larvae or mosquito (such as by position of integration, or being non-naturally found within the cell).

[0163] The nucleic acid agent can be further comprised within a nucleic acid construct comprising additional regulatory elements. Thus, according to some embodiments of aspects of the invention there is provided a nucleic acid construct comprising isolated nucleic acid agent comprising a nucleic acid sequence which specifically reduces the expression of at least one mosquito pathogen resistance gene product.

[0164] Although the instant teachings mainly concentrate on the use of dsRNA which is not comprised in or transcribed from an expression vector (naked), the present teachings also contemplate an embodiment wherein the nucleic acid agent is ligated into a nucleic acid construct comprising additional regulatory elements. Thus, according to some embodiments of the invention there is provided a nucleic acid construct comprising an isolated nucleic acid agent comprising a nucleic acid sequence.

[0165] For transcription from an expression cassette, a regulatory region (e.g., promoter, enhancer, silencer, leader, intron and polyadenylation) may be used to modulate the transcription of the RNA strand (or strands). Therefore, in one embodiment, there is provided a nucleic acid construct comprising the nucleic acid agent. The nucleic acid construct can have polynucleotide sequences constructed to facilitate transcription of the RNA molecules of the present invention operably linked to one or more promoter sequences functional in a mosquito cell. The polynucleotide sequences may be placed under the control of an endogenous promoter normally present in the mosquito genome. The polynucleotide sequences of the present invention, under the control of an operably linked promoter sequence, may further be flanked by additional sequences that advantageously affect its transcription and/or the stability of a resulting transcript. Such sequences are generally located upstream of the promoter and/or downstream of the 3′ end of the expression construct. The term “operably linked”, as used in reference to a regulatory sequence and a structural nucleotide sequence, means that the regulatory sequence causes regulated expression of the linked structural nucleotide sequence. “Regulatory sequences” or “control elements” refer to nucleotide sequences located upstream, within, or downstream of a structural nucleotide sequence, and which influence the timing and level or amount of transcription, RNA processing or stability, or translation of the associated structural nucleotide sequence. Regulatory sequences may include promoters, translation leader sequences, introns, enhancers, stem-loop structures, repressor binding sequences, termination sequences, pausing sequences, polyadenylation recognition sequences, and the like.

[0166] It will be appreciated that the nucleic acid agents can be delivered to the mosquito larva in a variety of ways.

[0167] According to one embodiment, the composition of some embodiments comprises cells, which comprise the nucleic acid agent.

[0168] As used herein the term “cell” or “cells” refers to a mosquito larva ingestible cell.

[0169] Examples of such cells include, but are not limited to, cells of phytoplankton (e.g., algae), fungi (e.g., Legendium giganteum), bacteria, and zooplankton such as rotifers.

[0170] Specific examples include, bacteria (e.g., cocci and rods), filamentous algae and detritus.

[0171] The choice of the cell may depend on the target larvae.

[0172] Analyzing the gut content of mosquitoes and larvae may be used to elucidate their preferred diet. The skilled artisan knows how to characterize the gut content. Typically the gut content is stained such as by using a fluorochromatic stain, 4′,6-diamidino-2-phenylindole or DAPI.

[0173] Cells of particular interest are the prokaryotes and the lower eukaryotes, such as fungi. Illustrative prokaryotes, both Gram-negative and Gram-positive, include Enterobacteriaceae; Bacillaceae; Rhizobiceae; Spirillaceae; Lactobacillaceae; and phylloplane organisms such as members of the Pseudomonadaceae.

[0174] An exemplary list includes Bacillus spp., including B. megaterium, B. subtilis; B. cereus, Bacillus thuringiensis, Escherichia spp., including E. coli, and/or Pseudomonas spp., including P. cepacia, P. aeruginosa, and P. fluorescens.

[0175] Among eukaryotes are fungi, such as Phycomycetes and Ascomycetes, which includes yeast, such as Schizosaccharomyces; and Basidiomycetes, Rhodotorula, Aureobasidium, Sporobolomyces, Saccharomyces spp., and Sporobolomyces spp.

[0176] According to a specific embodiment, the cell is an algal cell.

[0177] Various algal species can be used in accordance with the teachings of the invention since they are a significant part of the diet for many kinds of mosquito larvae that feed opportunistically on microorganisms as well as on small aquatic animals such as rotifers.

[0178] Examples of algae that can be used in accordance with the present teachings include, but are not limited to, blue-green algae as well as green algae.

[0179] According to a specific embodiment, the algal cell is a cyanobacterium cell which is in itself toxic to mosquitoes as taught by Marten 2007 Biorational Control of Mosquitoes. American mosquito control association Bulletin No. 7.

[0180] Specific examples of algal cells which can be used in accordance with the present teachings are provided in Marten, G. G. (1986) Mosquito control by plankton management: the potential of indigestible green algae. Journal of Tropical Medicine and Hygiene, 89: 213-222, and further listed infra.

### Green Algae

[0181] Actinastrum hantzschii, Ankistrodesmus falcatus, Ankistrodesmus spiralis, Aphanochaete elegans, Chlamydomonas sp., Chlorella ellipsoidea, Chlorella pyrenoidosa, Chlorella variegate, Chlorococcum hypnosporum, Chodatella brevispina, Closterium acerosum, Closteriopsis acicularis, Coccochloris peniocystis, Crucigenia lauterbornii, Crucigenia tetrapedia, Coronastrum ellipsoideum, Cosmarium botrytis, Desmidium swartzii, Eudorina elegans, Gloeocystis gigas, Golenkinia minutissima, Gonium multicoccum, Nannochloris oculata, Oocystis mars sonii, Oocystis minuta, Oocystis pusilla, Palmella texensis, Pandorina morum, Paulschulzia pseudovolvox, Pediastrum clathratum, Pediastrum duplex, Pediastrum simplex, Planktosphaeria gelatinosa, Polyedriopsis spinulosa, Pseudococcomyxa adhaerans, Quadrigula closterioides, Radiococcus nimbatus, Scenedesmus basiliensis, Spirogyra pratensis, Staurastrum gladiosum, Tetraedron bitridens, Trochiscia hystrix.

### Blue-Green Algae

[0182] Anabaena catenula, Anabaena spiroides, Chroococcus turgidus, Cylindrospermum licheniforme, Bucapsis sp. (U. Texas No. 1519), Lyngbya spiralis, Microcystis aeruginosa, Nodularia spumigena, Nostoc linckia, Oscillatoria lutea, Phormidiumfaveolarum, Spinilina platensis.

### Other

[0183] Compsopogon coeruleus, CTyptomonas ovata, Navicula pelliculosa.

[0184] The nucleic acid agent is introduced into the cells. To this end cells are typically selected exhibiting natural competence or are rendered competent, also referred to as artificial competence.

[0185] Competence is the ability of a cell to take up nucleic acid molecules e.g., the nucleic acid agent, from its environment.

[0186] A number of methods are known in the art to induce artificial competence.

[0187] Thus, artificial competence can be induced in laboratory procedures that involve making the cell passively permeable to the nucleic acid agent by exposing it to conditions that do not normally occur in nature. Typically the cells are incubated in a solution containing divalent cations (e.g., calcium chloride) under cold conditions, before being exposed to a heat pulse (heat shock).

[0188] Electroporation is another method of promoting competence. In this method the cells are briefly shocked with an electric field (e.g., 10-20 kV/cm) which is thought to create holes in the cell membrane through which the nucleic acid agent may enter. After the electric shock the holes are rapidly closed by the cell's membrane-repair mechanisms.

[0189] Yet alternatively or additionally, cells may be treated with enzymes to degrade their cell walls, yielding. These cells are very fragile but take up foreign nucleic acids at a high rate.

[0190] Exposing intact cells to alkali cations such as those of cesium or lithium allows the cells to take up nucleic acids. Improved protocols use this transformation method, while employing lithium acetate, polyethylene glycol, and single-stranded nucleic acids. In these protocols, the single-stranded molecule preferentially binds to the cell wall in yeast cells, preventing double stranded molecule from doing so and leaving it available for transformation.

[0191] Enzymatic digestion or agitation with glass beads may also be used to transform cells.

[0192] Particle bombardment, microprojectile bombardment, or biolistics is yet another method for artificial competence. Particles of gold or tungsten are coated with the nucleic acid agent and then shot into cells.

[0193] Astier C R Acad Sci Hebd Seances Acad Sci D. 1976 Feb. 23; 282(8):795-7, which is hereby incorporated by reference in its entirety, teaches transformation of a unicellular, facultative chemoheterotroph blue-green Algae, Aphanocapsa 6714. The recipient strain becomes competent when the growth reaches its second, slower, exponential phase.

[0194] Vázquez-Acevedo M¹Mitochondrion. 2014 Feb. 21. pii: 51567-7249(14)00019-1. doi: 10.1016/j.mito.2014.02.005, which is hereby incorporated by reference in its entirety, teaches transformation of algal cells e.g., Chlamydomonas reinhardtii, Polytomella sp. and Volvox carteri by generating import-competent mitochondria.

[0195] According to a specific embodiment the composition of the invention comprises an RNA binding protein.

[0196] According to a specific embodiment, the dsRNA binding protein (DRBP) comprises any of the family of eukaryotic, prokaryotic, and viral-encoded products that share a common evolutionarily conserved motif specifically facilitating interaction with dsRNA. Polypeptides which comprise dsRNA binding domains (DRBDs) may interact with at least 11 bp of dsRNA, an event that is independent of nucleotide sequence arrangement. More than 20 DRBPs have been identified and reportedly function in a diverse range of critically important roles in the cell. Examples include the dsRNA-dependent protein kinase PKR that functions in dsRNA signaling and host defense against virus infection and DICER.

[0197] Alternatively or additionally, an siRNA binding protein may be used as taught in U.S. Pat. Application No. 20140045914, which is herein incorporated by reference in its entirety.

[0198] According to a specific embodiment the RNA binding protein is the p19 RNA binding protein. The protein may increase in vivo stability of an siRNA molecule by coupling it at a binding site where the homodimer of the p19 RNA binding proteins is formed and thus protecting the siRNA from external attacks and accordingly, it can be utilized as an effective siRNA delivery vehicle.

[0199] According to a specific embodiment, the RNA binding protein may be attached to a target-oriented peptide.

[0200] According to a specific embodiment, the target-oriented peptide is located on the surface of the siRNA binding protein.

[0201] According to specific embodiments of the invention, whole cell preparations, cell extracts, cell suspensions, cell homogenates, cell lysates, cell supernatants, cell filtrates, or cell pellets of cell cultures of cells comprising the nucleic acid agent can be used.

[0202] The composition of some embodiments of the invention may further comprise at least one of a surface-active agent, an inert carrier vehicle, a preservative, a humectant, a feeding stimulant, an attractant, an encapsulating agent, a binder, an emulsifier, a dye, an ultra-violet protector, a buffer, a flow agent or fertilizer, micronutrient donors.

[0203] According to a specific embodiment, the cells are formulated by any means known in the art. The methods for preparing such formulations include, e.g., desiccation, lyophilization, homogenization, extraction, filtration, encapsulation centrifugation, sedimentation, or concentration of one or more cell types.

[0204] Additionally, the composition may be supplemented with larval food (food bait) or with excrements of farm animals, on which the mosquito larvae feed.

[0205] In one embodiment, the composition comprises an oil flowable suspension. For example, in some embodiments, oil flowable or aqueous solutions may be formulated to contain lysed or unlysed cells, spores, or crystals.

[0206] In a further embodiment, the composition may be formulated as a water dispersible granule or powder.

[0207] In yet a further embodiment, the compositions of the present invention may also comprise a wettable powder, spray, emulsion, colloid, aqueous or organic solution, dust, pellet, or colloidal concentrate. Dry forms of the compositions may be formulated to dissolve immediately upon wetting, or alternatively, dissolve in a controlled-release, sustained-release, or other time-dependent manner.

[0208] Alternatively or additionally, the composition may comprise an aqueous solution. Such aqueous solutions or suspensions may be provided as a concentrated stock solution which is diluted prior to application, or alternatively, as a diluted solution ready-to-apply. Such compositions may be formulated in a variety of ways. They may be employed as wettable powders, granules or dusts, by mixing with various inert materials, such as inorganic minerals (silicone or silicon derivatives, phyllosilicates, carbonates, sulfates, phosphates, and the like) or botanical materials (powdered corncobs, rice hulls, walnut shells, and the like).

[0209] The formulations may include spreader-sticker adjuvants, stabilizing agents, other pesticidal additives, or surfactants. Liquid formulations may be employed as foams, suspensions, emulsifiable concentrates, or the like. The ingredients may include Theological agents, surfactants, emulsifiers, dispersants, or polymers.

[0210] As mentioned, the dsRNA of the invention may be administered as a naked dsRNA. Alternatively, the dsRNA of the invention may be conjugated to a carrier known to one of skill in the art, such as a transfection agent e.g. PEI or chitosan or a protein/lipid carrier.

[0211] The compositions may be formulated prior to administration in an appropriate means such as lyophilized, freeze-dried, microencapsulated, desiccated, or in an aqueous carrier, medium or suitable diluent, such as saline or other buffer. Suitable agricultural carriers can be solid, semi-solid or liquid and are well known in the art. The term “agriculturally-acceptable carrier” covers all adjuvants, e.g., inert components, dispersants, surfactants, tackifiers, binders, etc. that are ordinarily used in pesticide formulation technology.

[0212] According to one embodiment, the composition is formulated as a semi-solid such as in agarose (e.g. agarose cubes).

[0213] As mentioned, the nucleic acid agents can be delivered to the mosquito larva in various ways. Thus, administration of the composition to the mosquito larva may be carried out using any suitable or desired manual or mechanical technique for application of a composition comprising a nucleic acid agent, including but not limited to spraying, soaking, brushing, dressing, dripping, dipping, coating, spreading, applying as small droplets, a mist or an aerosol.

[0214] According to one embodiment, the composition is administered to the larvae by soaking or by spraying.

[0215] Soaking the larva with the composition can be effected for about 2 hours to 96 hours, about 2 hours to 84 hours, about 2 hours to 72 hours, for about 2 hours to 60 hours, about 2 hours to 48 hours, about 2 hours to 36 hours, about 2 hours to 24 hours, about 2 hours to 12 hours, 12 hours to 96 hours, about 12 hours to 84 hours, about 12 hours to 72 hours, for about 12 hours to 60 hours, about 12 hours to 48 hours, about 12 hours to 36 hours, about 12 hours to 24 hours, or about 24 hours to 48 hours.

[0216] According to a specific embodiment, the composition is administered to the larvae by soaking for 12-24 hours.

[0217] According to one embodiment, the composition is administered to the larvae by feeding.

[0218] Feeding the larva with the composition can be effected for about 2 hours to 120 hours, about 2 hours to 108 hours, about 2 hours to 96 hours, about 2 hours to 84 hours, about 2 hours to 72 hours, for about 2 hours to 60 hours, about 2 hours to 48 hours, about 2 hours to 36 hours, about 2 hours to 24 hours, about 2 hours to 12 hours, 12 hours to 24 hours, about 24 hours to 36 hours, about 24 hours to 48 hours, about 36 hours to 48 hours, for about 48 hours to 60 hours, about 60 hours to 72 hours, about 72 hours to 84 hours, about 84 hours to 96 hours, about 96 hours to 108 hours, or about 108 hours to 120 hours.

[0219] According to a specific embodiment, the composition is administered to the larvae by feeding for 48-96 hours.

[0220] According to one embodiment, feeding the larva with the composition is affected until the larva reaches pupa stage.

[0221] According to one embodiment, dsRNA is administered to the larva by soaking followed by feeding with food-containing dsRNA. Thus, for example, larvae (e.g. first, second, third or four instar larva, e.g. third instar larvae) are first treated (in groups of about 100 larvae) with dsRNA at a dose of about 0.001-5 μg/μL (e.g. 0.2 μg/μL), in a final volume of about 3 mL of dsRNA solution in autoclaved water. After soaking in the dsRNA solutions for about 12-48 hours (e.g. for 24 hrs) at 25-29° C. (e.g. 27° C.), the larvae are transferred into containers so as not to exceed concentration of about 200-500 larvae/1500 mL (e.g. 300 larvae/1500 mL) of chlorine-free tap water, and provided with food containing dsRNA (e.g. agarose cubes containing 300 μg of dsRNA, e.g. 1 μg of dsRNA/larvae). The larva are fed once a day until they reach pupa stage (e.g. for 2-5 days, e.g. four days). Larvae are also fed with additional food requirements, e.g. 2-10 mg/100 mL (e.g. 6 mg/100 mL) lab dog/cat diet suspended in water.

[0222] Feeding the larva can be effected using any method known in the art. Thus, for example, the larva may be fed with agrose cubes, chitosan nanoparticles, oral delivery or diet containing dsRNA.

[0223] Chitosan nanoparticles: A group of 15-20 3rd-instar mosquito larvae are transferred into a container (e.g. 500 ml glass beaker) containing 50-1000 ml, e.g. 100 ml, of deionized water. One sixth of the gel slices that are prepared from dsRNA (e.g. 32 μg of dsRNA) are added into each beaker. Approximately an equal amount of the gel slices are used to feed the larvae once a day for a total of 2-5 days, e.g. four days (see Insect Mol Biol. 2010 19(5):683-93).

[0224] Oral delivery of dsRNA: First instar larvae (less than 24 hrs old) are treated in groups of 10-100, e.g. 50, in a final volume of 25-100 μl of dsRNA, e.g. 75 μl of dsRNA, at various concentrations (ranging from 0.01 to 5 μg/μl, e.g. 0.02 to 0.5 μg/μ1-dsRNAs) in tubes e.g. 2 mL microfuge tube (see J Insect Sci. 2013; 13:69).

[0225] Diet containing dsRNA: larvae are fed a single concentration of 1-2000 ng dsRNA/mL, e.g. 1000 ng dsRNA/mL, diet in a diet overlay bioassay for a period of 1-10 days, e.g. 5 days (see PLoS One. 2012; 7(10): e47534.).

[0226] Diet containing dsRNA: Newly emerged larvae are starved for 1-12 hours, e.g. 2 hours, and are then fed with a single drop of 0.5-10 μl, e.g. 1 μl, containing 1-20 μg, e.g. 4 μg, dsRNA (1-20 μg of dsRNA/larva, e.g. 4 μg of dsRNA/larva) (see Appl Environ Microbiol. 2013 August; 79(15):4543-50).

[0227] Thus, according to a specific embodiment, the composition may be applied to standing water. The mosquito larva may be soaked in the water for several hours (1, 2, 3, 4, 5, 6 hours or more) to several days (1, 2, 3, 4 days or more) with or without the use of transfection reagents or dsRNA carriers.

[0228] Alternatively, the mosquito larva may be sprayed with an effective amount of the composition (e.g. via an aqueous solution).

[0229] If needed, the composition may be dissolved, suspended and/or diluted in a suitable solution (as described in detail above) before use.

[0230] The nucleic acid compositions of the invention may be employed in the method of the invention singly or in combination with other compounds, including, but not limited to, inert carriers that may be natural, synthetic, organic or inorganic, humectants, feeding stimulants, attractants, encapsulating agents (for example Algae, bacteria and yeast, nanoparticles), dsRNA binding proteins, binders, emulsifiers, dyes, sugars, sugar alcohols, starches, modified starches, dispersants, or combinations thereof may also be utilized in conjunction with the composition of some embodiments of the invention.

[0231] Compositions of the invention can be used to control (e.g. exterminate) mosquitoes. Such an application comprises administering to larvae of the mosquitoes an effective amount of the composition which renders an adult stage of the mosquitoes lethally susceptible to a pathogen, thereby controlling (e.g. exterminating) the mosquitoes.

[0232] Thus, regardless of the method of application, the amount of the active component(s) are applied at a effective amount for an adult stage of the mosquito to be lethally susceptible to a pathogen, which will vary depending on factors such as, for example, the specific mosquito to be controlled, the type of pathogen (bacteria, virus, protozoa, etc.), the water source to be treated, the environmental conditions, and the method, rate, and quantity of application of the composition.

[0233] The concentration of the composition that is used for environmental, systemic, or foliar application will vary widely depending upon the nature of the particular formulation, means of application, environmental conditions, and degree of biocidal activity.

[0234] Exemplary concentrations of dsRNA in the composition (e.g. for soaking) include, but are not limited to, about 1 pg-10 μg of dsRNA/μl, about 1 pg-1 μg of dsRNA/μl, about 1 pg-0.1 μg of dsRNA/μl, about 1 pg-0.01 μg of dsRNA/μl, about 1 pg-0.001 μg of dsRNA/μl, about 0.001 μg-10 μg of dsRNA/μl, about 0.001 μg-5 μg of dsRNA/μl, about 0.001 μg-1 μg of dsRNA/μl, about 0.001 μg-0.1 μg of dsRNA/μl, about 0.001 μg-0.01 μg of dsRNA/μl, about 0.01 μg-10 μg of dsRNA/μl, about 0.01 μg-5 μg of dsRNA/μl, about 0.01 μg-1 μg of dsRNA/μl, about 0.01 μg-0.1 μg of dsRNA/μl, about 0.1 μg-10 μg of dsRNA/μl, about 0.1 μg-5 μg of dsRNA/μl, about 0.5 μg-5 μg of dsRNA/μl, about 0.5 μg-10 μg of dsRNA/μl, about 1 iμg-5 iμg of dsRNA/μl, or about 1 μg-10 μg of dsRNA/μl.

[0235] When formulated as a feed, the dsRNA may be effected at a dose of 1 pg/larvae-1000 μg/larvae, 1 pg/larvae-500 μg/larvae, 1 pg/larvae-100 μg/larvae, 1 pg/larvae-10 μg/larvae, 1 pg/larvae-1 μg/larvae, 1 pg/larvae-0.1 μg/larvae, 1 pg/larvae-0.01 μg/larvae, 1 pg/larvae-0.001 μg/larvae, 0.001-1000 μg/larvae, 0.001-500 μg/larvae, 0.001-100 μg/larvae, 0.001-50 μg/larvae, 0.001-10 μg/larvae, 0.001-1 μg/larvae, 0.001-0.1 μg/larvae, 0.001-0.01 μg/larvae, 0.01-1000 μg/larvae, 0.01-500 μg/larvae, 0.01-100 μg/larvae, 0.01-50 μg/larvae, 0.01-10 μg/larvae, 0.01-1 μg/larvae, 0.01-0.1 μg/larvae, 0.1-1000 μg/larvae, 0.1-500 μg/larvae, 0.1-100 μg/larvae, 0.1-50 μg/larvae, 0.1-10 μg/larvae, 0.1-1 μg/larvae, 1-1000 μg/larvae, 1-500 μg/larvae, 1-100 μg/larvae, 1-50 μg/larvae, 1-10 μg/larvae, 10-1000 μg/larvae, 10-500 μg/larvae, 10-100 μg/larvae, 10-50 μg/larvae, 50-1000 μg/larvae, 50-500 μg/larvae, 50-400 μg/larvae, 50-300 μg/larvae, 100-500 μg/larvae, 100-300 μg/larvae, 200-500 μg/larvae, 200-300 μg/larvae, or 300-500 μg/larvae.

[0236] The mosquito larva food containing dsRNA may be prepared by any method known to one of skill in the art. Thus, for example, cubes of dsRNA-containing mosquito food may be prepared by first mixing 10-500 μg, e.g. 300 μg of dsRNA with 3 to 300 μg, e.g. 10 μg of a transfection agent e.g. Polyethylenimine 25 kDa linear (Polysciences) in 10-500 μL, e.g. 200 μL of sterile water. Alternatively, 2 different dsRNA (10-500 μg, e.g. 150 μg of each) plus 3 to 300 μg, e.g. 30 μg of Polyethylenimine may be mixed in 10-500 μL, e.g. 200 μL of sterile water. Alternatively, cubes of dsRNA-containing mosquito food may be prepared without the addition of transfection reagents. Then, a suspension of ground mosquito larval food (1-20 grams/100 mL e.g. 6 grams/100 mL) may be prepared with 2% agarose (Fisher Scientific). The food/agarose mixture can then be heated to 53-57° C., e.g. 55° C., and 10-500 μL, e.g. 200 μL of the mixture can then be transferred to the tubes containing 10-500 μL, e.g. 200 μL of dsRNA+PEI or dsRNA only. The mixture is then allowed to solidify into a gel. The solidified gel containing both the food and dsRNA can be cut into small pieces (approximately 1-10 mm, e.g. 1 mm, thick) using a razor blade, and can be used to feed mosquito larvae in water.

[0237] According to some embodiments, the nucleic acid agent is provided in amounts effective to reduce or suppress expression of at least one mosquito pathogen resistance gene product. As used herein “a suppressive amount” or “an effective amount” refers to an amount of dsRNA which is sufficient to downregulate (reduce expression of) the target gene by at least 20%, 30%, 40%, 50%, or more, say 60%, 70%, 80%, 90% or more even 100%.

[0238] Testing the efficacy of gene silencing can be effected using any method known in the art. For example, using quantitative RT-PCR measuring gene knockdown. Thus, for example, ten to twenty larvae from each treatment group can be collected and pooled together. RNA can be extracted therefrom and cDNA syntheses can be performed. The cDNA can then be used to assess the extent of RNAi by measuring levels of gene expression using qRT-PCR.

[0239] Reagents of the present invention can be packed in a kit including the nucleic acid agent (e.g. dsRNA), instructions for administration of the nucleic acid agent, construct or composition to mosquito larva.

[0240] Compositions of some embodiments of the invention may, if desired, be presented in a pack or dispenser device, which may contain one or more dosage forms containing the active ingredient. The pack may, for example, comprise metal or plastic foil, such as a blister pack. The pack or dispenser device may be accompanied by instructions for administration to the mosquito larva.

[0241] As used herein the term “about” refers to ±10%.

[0242] The terms “comprises”, “comprising”, “includes”, “including”, “having” and their conjugates mean “including but not limited to”.

[0243] The term “consisting of” means “including and limited to”.

[0244] The term “consisting essentially of” means that the composition, method or structure may include additional ingredients, steps and/or parts, but only if the additional ingredients, steps and/or parts do not materially alter the basic and novel characteristics of the claimed composition, method or structure.

[0245] As used herein, the singular form “a”, “an” and “the” include plural references unless the context clearly dictates otherwise. For example, the term “a compound” or “at least one compound” may include a plurality of compounds, including mixtures thereof.

[0246] Throughout this application, various embodiments of this invention may be presented in a range format. It should be understood that the description in range format is merely for convenience and brevity and should not be construed as an inflexible limitation on the scope of the invention. Accordingly, the description of a range should be considered to have specifically disclosed all the possible subranges as well as individual numerical values within that range. For example, description of a range such as from 1 to 6 should be considered to have specifically disclosed subranges such as from 1 to 3, from 1 to 4, from 1 to 5, from 2 to 4, from 2 to 6, from 3 to 6 etc., as well as individual numbers within that range, for example, 1, 2, 3, 4, 5, and 6. This applies regardless of the breadth of the range.

[0247] Whenever a numerical range is indicated herein, it is meant to include any cited numeral (fractional or integral) within the indicated range. The phrases “ranging/ranges between” a first indicate number and a second indicate number and “ranging/ranges from” a first indicate number “to” a second indicate number are used herein interchangeably and are meant to include the first and second indicated numbers and all the fractional and integral numerals therebetween.

[0248] As used herein the term “method” refers to manners, means, techniques and procedures for accomplishing a given task including, but not limited to, those manners, means, techniques and procedures either known to, or readily developed from known manners, means, techniques and procedures by practitioners of the chemical, pharmacological, biological, biochemical and medical arts.

[0249] As used herein, the term “treating” includes abrogating, substantially inhibiting, slowing or reversing the progression of a condition, substantially ameliorating clinical or aesthetical symptoms of a condition or substantially preventing the appearance of clinical or aesthetical symptoms of a condition.

[0250] It is appreciated that certain features of the invention, which are, for clarity, described in the context of separate embodiments, may also be provided in combination in a single embodiment. Conversely, various features of the invention, which are, for brevity, described in the context of a single embodiment, may also be provided separately or in any suitable subcombination or as suitable in any other described embodiment of the invention. Certain features described in the context of various embodiments are not to be considered essential features of those embodiments, unless the embodiment is inoperative without those elements.

[0251] Various embodiments and aspects of the present invention as delineated hereinabove and as claimed in the claims section below find experimental support in the following examples.

### EXAMPLES

[0252] Reference is now made to the following examples, which together with the above descriptions, illustrate the invention in a non limiting fashion.

[0253] Generally, the nomenclature used herein and the laboratory procedures utilized in the present invention include molecular, biochemical, microbiological and recombinant DNA techniques. Such techniques are thoroughly explained in the literature. See, for example, “Molecular Cloning: A laboratory Manual” Sambrook et al., (1989); “Current Protocols in Molecular Biology” Volumes I-III Ausubel, R. M., ed. (1994); Ausubel et al., “Current Protocols in Molecular Biology”, John Wiley and Sons, Baltimore, Md. (1989); Perbal, “A Practical Guide to Molecular Cloning”, John Wiley & Sons, New York (1988); Watson et al., “Recombinant DNA”, Scientific American Books, New York; Birren et al. (eds) “Genome Analysis: A Laboratory Manual Series”, Vols. 1-4, Cold Spring Harbor Laboratory Press, New York (1998); methodologies as set forth in U.S. Pat. Nos. 4,666,828; 4,683,202; 4,801,531; 5,192,659 and 5,272,057; “Cell Biology: A Laboratory Handbook”, Volumes I-III Cellis, J. E., ed. (1994); “Current Protocols in Immunology” Volumes I-III Coligan J. E., ed. (1994); Stites et al. (eds), “Basic and Clinical Immunology” (8th Edition), Appleton & Lange, Norwalk, Conn. (1994); Mishell and Shiigi (eds), “Selected Methods in Cellular Immunology”, W. H. Freeman and Co., New York (1980); available immunoassays are extensively described in the patent and scientific literature, see, for example, U.S. Pat. Nos. 3,791,932; 3,839,153; 3,850,752; 3,850,578; 3,853,987; 3,867,517; 3,879,262; 3,901,654; 3,935,074; 3,984,533; 3,996,345; 4,034,074; 4,098,876; 4,879,219; 5,011,771 and 5,281,521; “Oligonucleotide Synthesis” Gait, M. J., ed. (1984); “Nucleic Acid Hybridization” Hames, B. D., and Higgins S. J., eds. (1985); “Transcription and Translation” Hames, B. D., and Higgins S. J., Eds. (1984); “Animal Cell Culture” Freshney, R. 1., ed. (1986); “Immobilized Cells and Enzymes” IRL Press, (1986); “A Practical Guide to Molecular Cloning” Perbal, B., (1984) and “Methods in Enzymology” Vol. 1-317, Academic Press; “PCR Protocols: A Guide To Methods And Applications”, Academic Press, San Diego, Calif. (1990); Marshak et al., “Strategies for Protein Purification and Characterization—A Laboratory Course Manual” CSHL Press (1996); all of which are incorporated by reference as if fully set forth herein. Other general references are provided throughout this document. The procedures therein are believed to be well known in the art and are provided for the convenience of the reader. All the information contained therein is incorporated herein by reference.

### Example 1

### Materials and Experimental Procedures

[0254] Gene Target Selection

[0255] Target genes are selected according to reported microarray and RNAseq experiments that compare populations of infected versus uninfected mosquitoes. A list of about 100 potential genes for target is generated. Genes from different functional categories are targeted, such as: metabolism (MET), immunity (IMM), cytoskeleton, cell membrane, cell motility and extracellular structures (C-CWCM-ES), post-translational modification, protein turnover, chaperone (PM-PT-C), signal transduction (ST), proteolysis (PROT), oxidoreductase activity (REDOX), transcription and translation (TT), diverse (DIV), transport (TR), cell-cycle (CC), energy production and conversion (EPC), chromatin structure and dynamics (CSD). The specific sequence for targeting is selected according to siRNA analysis available on-line, such as://www(dot)med(dot)nagoya-u(dot)ac(dot)jp/neurogenetics/i_Score/i_score(dot)html. The selected sequences are ordered synthetically and serve as template for in vitro reverse transcription reaction.

[0256] For example, RNAi pathway genes, including the sequence of the gene

[0257] AAEL011753 (r2d2) by 76-575 (SEQ ID NO: 304, one of the proteins of the silencing complex) is selected for targeting and dsRNA targeting same is generated as described below.

[0258] dsRNA Preparation

[0259] dsRNA preparation is performed by reverse transcription reaction using T7 primers, such as with the Ambion® MEGAscript® RNAi Kit. dsRNA integrity is verified on gel and purified by a column based method. The concentration of the dsRNA is evaluated both by Nano-drop and gel-based estimation. This dsRNA serves for the following experiments.

[0260] Bioassays

[0261] A. aegypti is reared at 27° C., 50% humidity, on a 16:8 L:D photoperiod. Females are fed warmed cattle blood through a stretched film. Mosquito eggs are allowed to develop for a minimum of one week, then are submerged in dechlorinated tap water to induce hatching. Larvae are maintained on a ground powder diet compromising dry cat food, dry rabbit chow, fish flakes and yeast.

[0262] Groups of 20 first instar larvae are soaked for 2 hr in 75 μl water containing 0.5 μg/μl dsRNA and 0.5% bromophenol blue. The larvae are photographed and the intensity of the dye in the gut is calculated using ImageJ image processing software (://rsbweb(dot)nih(dot)gov/ij/). The extent of dye in the gut is correlated with the extent of knockdown of the gene expression using quantitative reverse transcriptase PCR (see section below). Once it is determined that dsRNA is being ingested by larvae, subsequent dsRNA treatments are performed without the addition of the dye.

[0263] First instar larvae (less than 24 hr old) are treated in groups of 50 in a final volume 75 μl of dsRNA at a concentration of 0.5 μg/μl dsRNAs) in a 2 mL microfuge tube. Negative control larvae are treated with either water alone or with scrambled dsRNA, which has no homology with any mosquito genes and has no adverse effects on several other insects.

[0264] Larvae are soaked in the dsRNA solutions for 2 hr at 27° C., and then transferred to 12-well tissue culture plates, which are also maintained at 27° C., and are provided with a restricted diet on a daily basis. This amount of food is equivalent to half-rations of food per day typically enabled for most of the insects' population to develop to the pupal stage in 5 days. The reduced food during these bioassays slows their development and facilitates easier monitoring of differential growth rates and/or survivorship. Growth and/or survival of the larvae are observed over a 2-week period, by which time all non-treated larvae are pupated and have developed into adults. Once becoming adults, the mosquitoes are infected with viruses, and the extant of infection is tested.

[0265] Quantitative RT-PCR to Measure Gene Knockdown

[0266] Ten to 20 larvae from each treatment is collected and pooled together 3 days after the single 2 hr dsRNA soakings. RNA extractions and cDNA syntheses are performed. Only live insects are used for the RNA extractions, as the RNA in dead insects could have degraded. The cDNA from each replicate treatment is then used to assess the extent of RNAi by measuring levels of gene expression using qRT-PCR. Reactions are performed in triplicate and compared to an internal reference to compare levels of RNAi. Larva with decreased levels of a tested gene are allowed to pupate and become adult. The adult mosquitoes are further submitted to virus infection.

[0267] Virus and Mosquito Oral Infection

[0268] Viruses are cultured in Ae. albopictus C6/36 cells and high passage (25 passages) viruses are used in oral challenges as previously described [Salazar et al. (2007) BMC Microbiol 30: 7-9]. Specifically, about 350 adult females are fed either a virus-infected meal diluted 1:1 in cattle's blood or uninfected C6/36 cell culture medium diluted 1:1 in cattle's blood, respectively. Blood meals are measured for their viral titer. After blood feeding, 20 virus infected mosquitoes are sacrificed and viral titers are determined for each individual using a standard method as previously described [Hess et al. (2011) BMC Microbiol 11: 45]. Specifically, mosquito bodies are homogenized in 270 ml of Dulbecco's Modified Eagle Medium (DMEM) and then centrifuged to eliminate large debris particles. The supernatant are then further filtered and used in serial dilutions to infect monolayers of Vero cells. The lowest concentration infecting Vero cells is used to calculate the viral titer of virus infected mosquitoes.

### Results

### Use of Externally Ingested dsRNA to Increase Susceptibility of Mosquitoes to Human Pathogenic Viruses

[0269] A recently published RNAseq analysis describing mosquito transcriptional profiles during Dengue fever virus infection (DENVI) showed that all transcripts representing immunity-related genes with differential accumulation in midgut samples were always more abundant in control than DENV mosquitoes, supporting the conclusion that there is a suppression of the insect immune system following infection. This result may reflect the general ‘DENV downregulation trend” observed. A similar pattern was seen in carcass samples at early time points postinfection, but the opposite was observed at 14 days post infection (dpi), reflecting a possible change in immune modulation during the course of the infection [Bonizzoni et al. (2012) PLoS ONE 7(11): e50512].

[0270] The present inventors contemplate that feeding dsRNA to mosquitoes that will make them more susceptible to a pathogenic human virus that they carry means that only those mosquitoes that contract the virus will die from the dsRNA delivered.

[0271] Accordingly, genes to be targeted are selected, for example, as those whose products were more abundant in DENV as compared to control non-infected mosquitoes in carcass samples. Therefore, mosquitoes are fed with dsRNA targeting chromatin structure and dynamics (AAEL003673 [histone H4]; AAEL003689 [histone H4]; AAEL003669 [histone H2]), proteolysis (AAEL002610 [serine protease]), transcription and translation (AAEL005004) and immunity (AAEL011455 [CTLMA12]; AAEL007599, AAEL007585, AAEL012216, AAEL015312 [cathepsin B]; AAEL017536 [holotricin]).

[0272] Furthermore, genes to be targeted are selected, for example, as those whose transcript accumulation levels are higher in midgut samples of DENV as compared to control non-infected mosquitoes. Accordingly, mosquitoes are fed with dsRNA targeting genes linked to transcription and translation (AAEL003603), redox activity (AAEL007669) and to unknown functions (AAEL001702; AAEL017571).

[0273] Furthermore, genes to be targeted are selected, for example, as those who are more abundant in salivary glands of DENV as compared to control non-infected mosquitoes. Accordingly, mosquitoes are fed with dsRNA targeting immunity-related genes (AAEL015312 and AAEL012216, both encoding for cathepsin B). Furthermore, mosquitoes are fed with dsRNA targeting a total of 12 genes which had read coverage in salivary glands of DENV mosquitoes, but not in the salivary gland of control mosquitoes and are associated with various functions in metabolism (AAEL008418 [pyrroline-5-carboxylate reductase]), proteolysis (AAEL013857), the cytoskeleton (AAEL000335 [lamin]), redox activity (AAEL003211), chromatin structure and dynamics (AAEL003950 [helicase]), transcription and translation (AAEL002422 [cytoplasmic polyadenylation element binding protein]) and signal transduction (AAEL015328).

[0274] Moreover, when exposed to arboviruses mosquitoes respond with anti-microbial immune pathways like Janus kinase-signal transducer and activator of transcription (JAK/STAT) and Toll pathways, immune deficiency (IMD) and RNA interference (RNAi) machinery. Accordingly, mosquitoes are fed with dsRNA targeting these pathways. This process enables high viral titers and mosquito death.

[0275] Thus, mosquitoes are fed with dsRNA targeting Toll pathway genes (see FIG. 1) as listed in Table 2, below.

TABLE 2
Toll pathway genes

| | gene | |
|---|---|---|
| Gene ID | name | functional group |
| AAEL000652 | GNBPA2 | pattern recognition receptor |
| AAEL009178 | GNBPB4 | pattern recognition receptor |
| AAEL007064 | GNBPB6 | pattern recognition receptor |
| AAEL003253 | CLIPB13B | signal modulation |
| AAEL001929 | SPZ5 | Toll |
| AAEL011608 | PGRPLD | pattern recognition receptor |
| AAEL007696 | REL1A | Toll |
| AAEL015515 | CECG | Effector |
| AAEL004522 | GAM | Effector |
| AAEL015404 | LYSC | Effector |

[0276] Mosquitoes are fed with dsRNA targeting JAK/STAT pathway genes (see FIG. 2) as listed in Table 3, below.

TABLE 3
JAK/STAT pathway genes

| Gene ID | gene name |
|---|---|
| AAEL012471 | DOME |
| AAEL012553 | HOP |
| AAEL009692 | STAT |
| AAEL006949, | SOCS16D |
| AAEL006936 | |
| AAEL000255 | SOCS44A |
| AAEL000393 | SOCS |
| AAEL015099 | SUMO |

[0277] Mosquitoes are fed with dsRNA targeting RNAi machinery including the gene AAEL011753 (r2d2), dcr2, and ago2.

[0278] The piRNA pathway, which has been suggested to function as an additional small RNA-mediated antiviral response to the known infection-induced siRNA response, is also targeted by the dsRNA. Exemplary genes which are targeted include those coding for the proteins Ago3, Ago4-like, Ago5-like, Armitage, Spn-E,Rm62-like. Accordingly mosquitoes are fed with dsRNA targeting these genes.

[0279] Other Pathways and Genes which are Targeted with the dsRNA

[0280] Mosquitoes are also fed with dsRNA targeting other pathways and genes, which may be involved in increasing susceptibility of the mosquitoes to viral infections. These include the genes listed in Table 4A, below.

TABLE 4A
Other pathways and genes which may be targeted

| Gene Family or Pathway | Dm | Ag | Aa | 1:1:1 | 1:1 | Total |
|---|---|---|---|---|---|---|
| Attacins (ATTs) | 4 | 1 | 1 | 0 | 0 | 6 |
| Caspases (CASPs) | 7 | 14 | 10 | 2 | 2 | 31 |
| Catalases (CATs) | 2 | 1 | 2 | 0 | 0 | 5 |
| Cecropins (CECs) | 5 | 4 | 10 | 0 | 1 | 19 |
| CLIP-domain Serine Proteases | 11 | 15 | 6 | 3 | 1 | 32 |
| A (CLIPAs) | | | | | | |
| CLIP-domain Serine Proteases | 14 | 20 | 36 | 3 | 5 | 70 |
| B (CLIPBs) | | | | | | |
| CLIP-domain Serine Proteases | 7 | 8 | 12 | 0 | 4 | 27 |
| C (CLIPCs) | | | | | | |
| CLIP-domain Serine Proteases | 10 | 7 | 8 | 5 | 0 | 25 |
| D (CLIPDs) | | | | | | |
| CLIP-domain Serine Proteases | 3 | 6 | 5 | 0 | 0 | 14 |
| E (CLIPEs) | | | | | | |
| C-Type Lectins (CTLs) | 34 | 25 | 39 | 9 | 1 | 98 |
| Defensins (DEFs) | 1 | 4 | 4 | 0 | 0 | 9 |
| Fibrinogen-Related proteins | 14 | 61 | 37 | 2 | 3 | 112 |
| (FREPs) | | | | | | |
| Galectins (GALEs) | 6 | 10 | 12 | 3 | 1 | 28 |
| Glutathione Peroxidases (GPXs) | 2 | 3 | 3 | 2 | 1 | 8 |
| Gram-Negative Binding | 3 | 7 | 7 | 1 | 4 | 17 |
| Proteins (GNBPs) | | | | | | |
| Heme Peroxidases (HPXs) | 10 | 18 | 12 | 8 | 1 | 40 |
| IMD Pathway Members | 5 | 5 | 6 | 4 | 0 | 16 |
| Inhibitors of Apoptosis | 4 | 8 | 5 | 4 | 0 | 17 |
| (IAPs) | | | | | | |
| JAK/STAT Pathway Members | 3 | 4 | 3 | 2 | 0 | 10 |
| Lysozymes (LYSs) | 13 | 8 | 7 | 1 | 1 | 28 |
| MD2-like Proteins (MLs) | 8 | 11 | 17 | 2 | 2 | 36 |
| Other Anti-microbial Peptides | 11 | 1 | 3 | 0 | 1 | 15 |
| (AMPs)* | | | | | | |
| Peptidoglycan Recognition | 13 | 7 | 8 | 5 | 0 | 28 |
| Proteins (PGRPs) | | | | | | |
| Prophenoloxidases (PPOs) | 3 | 9 | 10 | 0 | 3 | 22 |
| Rel-like NFkappa-B Proteins | 3 | 2 | 3 | 1 | 0 | 8 |
| (RELs) | | | | | | |
| Scavenger Receptors Class-A | 5 | 5 | 5 | 4 | 1 | 15 |
| (SCRAs) | | | | | | |
| Scavenger Receptors Class-B | 13 | 13 | 13 | 8 | 5 | 39 |
| (SCRBs) | | | | | | |
| Scavenger Receptors Class-C | 4 | 1 | 2 | 0 | 1 | 7 |
| (SCRCs) | | | | | | |
| Serine Protease Inhibitors | 30 | 17 | 23 | 2 | 14 | 70 |
| (SRPNs) | | | | | | |
| Späetzle-like Proteins (SPZs) | 6 | 6 | 9 | 4 | 0 | 21 |
| Superoxide Dismutatses (SODs) | 4 | 5 | 6 | 4 | 1 | 15 |
| Thio-Ester Containing | 6 | 13 | 8 | 1 | 1 | 27 |
| Proteins (TEPs) | | | | | | |
| Thioredoxin Peroxidases | 8 | 5 | 5 | 4 | 1 | 18 |
| (TPXs) | | | | | | |
| Toll Pathway Members | 4 | 4 | 4 | 4 | 0 | 12 |
| Toll Receptors (TOLLs) | 9 | 10 | 12 | 3 | 2 | 30 |
| Totals | 285 | 338 | 353 | 91 | 57 | 976 |

*Diptericins, Drosomycins, Drosocin, Metchnikowin, Gambicin, Holotricin

[0281] Taken together, these genes can serve as valid target for dsRNA silencing, thus reducing the mosquito's self-defense against the virus infection, causing the mosquito to be more susceptible to virus infection.

### Example 2

### Materials and Experimental Procedures

[0282] Mosquito Maintenance

[0283] Mosquitoes were taken from an Ae. aegypti colony of the Rockefeller strain, which were reared continuously in the laboratory at 28° C. and 70-80% relative humidity. Adult mosquitoes were maintained in a 10% sucrose solution, and the adult females were fed with sheep blood for egg laying. The larvae were reared on dog/cat food unless stated otherwise.

[0284] Introducing dsRNA into a Mosquito Larvae

[0285] Soaking with “Naked” dsRNA Plus Additional Larvae Feeding with Food-Containing dsRNA

[0286] Third instar larvae were treated (in groups of 100 larvae) in a final volume of 3 mL of dsRNA solution in autoclaved water. Targets and dsRNA concentrations are shown in table 4B below. The control group was kept in 3 ml sterile water only. After soaking in the dsRNA solutions for 24 hr at 27° C., the larvae were transferred into new containers (300 larvae/1500 mL of chlorine-free tap water), and provided both agarose cubes containing 300 μg of dsRNA once a day (for a total of two days) and 6 mg/100 mL lab dog/cat diet (Purina Mills) suspended in water. As pupae developed, they were transferred to individual vials to await eclosion and sex sorting. For bioassays purpose only females up to five days old were used. See Flowchart in FIG. 4.

TABLE 4B
Targets and dsRNA concentrations

| dsRNA | Concentration (μg/μL per 100 larvae) |
|---|---|
| MyD88 (AAEL007768) | 0.2 |
| Rel-1A (AAEL007696) | 0.1 |
| AAEL003832 | 0.1 |
| AAEL000598 | 0.2 |
| AAEL007562 | 0.2 |
| AAEL010179 | 0.2 |

[0287] Preparation of Mosquito Larval Food Containing dsRNA

[0288] Cubes of dsRNA-containing mosquito food were prepared as follows: First, 300 μg of dsRNA were mixed with 30 μg of Polyethylenimine 25 kDa linear (Polysciences) in 200 μL of sterile water. Alternatively, 2 different dsRNA (150 μg of each) plus 30 μg of Polyethylenimine were mixed in 200 μL of sterile water. Then, a suspension of ground mosquito larval food (6 grams/100 mL) was prepared with 2% agarose (Fisher Scientific). The food/agarose mixture was heated to 55° C. and 200 μL of the mixture was then transferred to the tubes containing 200 μL of dsRNA+PEI or water only (control). The mixture was then allowed to solidify into a gel. The solidified gel containing both the food and dsRNA was cut into small pieces (approximately 1 mm thick) using a razor blade, which were then used to feed mosquito larvae in water.

[0289] RNA Isolation and dsRNA Production

[0290] Total RNA was extracted from groups of five Ae. aegypti fourth instar larvae and early adult male/female Ae. aegypti, using TRIzol (Invitrogen, Carlsbad, Calif., USA) according to the manufacturer's instructions. RNA was treated with amplification grade DNase I (Invitrogen) and 1 μg was used to synthesize cDNA using a First Strand cDNA Synthesis kit (Invitrogen). The cDNA served as template DNA for PCR amplification of gene fragments using the primers listed in Table 5, below. PCR products were purified using a QIAquick PCR purification kit (Qiagen). The MEGAscript RNAi kit (Ambion) was then used for in vitro transcription and purification of dsRNAs (Table 6, below).

TABLE 5
qPCR primers

| Target gene | Accession number | qPCR primers (5′-3′) |
|---|---|---|
| FHV RNA-1 | EF690537.1 | F: CCAGATCACCCGAACTGAAT |
| | | (SEQ ID NO: 1295) |
| | | R: AGGCTGTCAAGCGGATAGAA |
| | | (SEQ ID NO: 1296) |
| Argonaute-3 | XM_001652895.1 | F: TCGGCATTCGTAGCTTCGTT |
| AAEL007823 | | (SEQ ID NO: 1297) |
| | | R: GCAGCTGACAGTTTGCCTTC |
| | | (SEQ ID NO: 1298) |
| AuB | | F: CAGAATCCCAGACCCGGAAC |
| AAEL007698 | | (SEQ ID NO: 1299) |
| | | R: TTGGCGAAACCGTACCTTGA |
| | | (SEQ ID NO: 1300) |
| Cactus | XM_001650217.2 | F: ACTTTCCCTGGCCTTTCCAC |
| AAEL000709 | | (SEQ ID NO: 1301) |
| | | R: GCGAAACGTGAAGGTGCTAC |
| | | (SEQ ID NO: 1302) |
| MyD88 | XM_001658585.2 | F: TGCCGAGAACAGTGATCAGG |
| AAEL007768 | | (SEQ ID NO: 1303) |
| | | R: CTCAGATTTTTCGCCGGTGC |
| | | (SEQ ID NO: 1304) |
| AAEL007696 | XM_001652790.2 | F: GGACTCGTCGGAGCTGAAAT |
| Rel-1A | | (SEQ ID NO: 1305) |
| | | R: AACTGTCCGAGAGGGTTTCG |
| | | (SEQ ID NO: 1306) |
| AAEL003832 | XM_001657238.2 | F: TGAGTTTCTCGAGAGGAAAACCT |
| | | (SEQ ID NO: 1307) |
| | | R: TCACTACCCCTCCCTCGTTT |
| | | (SEQ ID NO: 1308) |
| AAEL000598 | XM_001649131.2 | F: TTCGCAGCTTTCGTCATGTG |
| | | (SEQ ID NO: 1309) |
| | | R: TTTCGAAACGGCGCAATCAC |
| | | (SEQ ID NO: 1310) |
| AAEL007562 | XM_001658400.1 | F: AGCTGCCATGTCTCAATCGT |
| | | (SEQ ID NO: 1311) |
| | | R: CCAGTTGGAAATTTCGCGGG |
| | | (SEQ ID NO: 1312) |
| AAEL010179 | XM_001654244.1 | F: TTCTGTTGGACGGCCCTTAC |
| | | (SEQ ID NO: 1313) |
| | | R: AGCCCGCAAACGGTGTAATA |
| | | (SEQ ID NO: 1314) |

TABLE 6
dsRNA sequences

| Target gene | Accession number | dsRNA sequence |
|---|---|---|
| Argonaute-3 | XM_001652895.1 | SEQ ID NO: 1315 |
| AAEL007823 | | |
| AuB | | SEQ ID NO: 1316 |
| AAEL007698 | | |
| Cactus | XM_001650217.2 | SEQ ID NO: 1317 |
| AAEL000709 | | |
| MyD88 | XM_001658585.2 | SEQ ID NO: 1318 |
| AAEL007768 | | |
| AAEL007696 | XM_001652790.2 | SEQ ID NO: 1319 |
| Rel1A | | |
| AAEL003832 | XM_001657238.2 | SEQ ID NO: 1320 |
| AAEL007562 | XM_001658400.1 | SEQ ID NO: 1321 |
| AAEL010179 | XM_001654244.1 | SEQ ID NO: 1322 |
| B2 FVH | X77156.1 | SEQ ID NO: 1323 |
| Dicer-2 | AY713296.1 | SEQ ID NO: 1324 |

[0291] qPCR Analysis

[0292] Approximately 1000 ng first-strand cDNA obtained as described previously was used as template. The qPCR reactions were performed using SYBR® Green PCR Master Mix (Applied Biosystems) following the manufacturer's instructions. Briefly, approximately 50 ng/μl cDNA and gene-specific primers (600 nM) were used for each reaction mixture. qPCR conditions used were 10 min at 95° C. followed by 35 cycles of 15 s at 94° C., 15 s at 54° C. and 60 s at 72° C. The ribosomal protein S7 and tubulin were used as the reference gene to normalize expression levels amongst the samples. Raw quantification cycle (Cq) values normalized against those of the tubulin and S7 standards were then used to calculate the relative expression levels in samples using the 2^{-ΔΔCt} method [Livak & Schmittgen, (2001) Methods. 25(4):402-8]. Results (mean±SD) are representative of at least two independent experiments performed in triplicate.

[0293] Cells and Preparation of Flock House Virus (FHV) Stocks

[0294] D. melanogaster cells (S2) were grown at 26° C. in Schneider's insect cell medium (Gibco, Life Technologies) supplemented with 10% fetal bovine serum (FBS). FHV stocks were prepared by propagation in S2 cells at a multiplicity of infection (MOI) of 5 for 72 hours. Then, cell-free supernatants were collected, aliquoted and stored at −80° C. until the moment of use. Viral loads were quantified in the S2-culture supernatants using a quantitative Real-Time PCR. Briefly, total viral RNA purified from 1×10⁸ PFU of FHV were 10-fold serially diluted to generate a standard curve. The viral RNA was purified using the QIAamp Viral RNA minikit (QIAGEN; Hamburg, Germany). Viral RNA was converted in cDNA using Improm II kit (Promega) and the quantitative PCR reaction was carried out with the Power SYBR Green Master mix (Invitrogen, Life Technologies) in a 7500-Real time PCR System (Applied Biosystems, Life Technologies). The primer sequences used for FHV detection were detailed in Table 5, above.

[0295] Infection of Mosquitoes with FHV

[0296] Female Aedes aegypti mosquitoes (Rockefeller strain) were infected with FHV by two different methods. In the first one, mosquitoes were fed an artificial blood meal mixed with FHV-infected S2 supernatants at a 1:1 ratio (virus titres were 1-2×10⁸ PFU/mL) through a pork gut membrane on a water-jacketed membrane feeder as previously described [Rutledge et al. (1964) Mosq News. 24:407-419], for 20 minutes, and then kept in breeding cages up to 15 days postinfection. Control mosquitoes were fed uninfected blood. In the second method of infection, the same source of FHV was diluted at 1:1 ratio in a 10%-solution of sugar. The mixture was then adsorbed in filter papers and placed into the breeding cages. The exposure to mosquitoes lasted 20 minutes. Control mosquitoes were exposed to sugar adsorbed in the filter papers.

[0297] Determination of Viral Loads in Infected Mosquitoes

[0298] Mosquitoes infected with FHV were collected at different time points postinfection, as indicated. Total RNA was extracted with TRIzol (Invitrogen) according to the manufacturer's protocol. cDNAs were synthesized by using Improm II Reverse transcriptase (Promega) and oligo dT (Thermo Scientific). Real-time quantitative PCRs were carried out using Power SYBR green Master Mix (Life technologies) and specific primers to FHV RNA1 (Table 6, above). The relative viral loads were estimated by the 2^{-ΔΔCT} method, and normalized to a mosquito endogenous control (tubulin).

### Results

### Use of dsRNA to Increase Susceptibility of Ae. Aegypti Mosquitoes to Flock House Virus (FHV)

[0299] In this study, the present inventors explored the infection of Ae. aegypti mosquitoes with Flock House virus (FHV) as an experimental model to increase the mosquito susceptibility to virus infection. The purpose of this experiment was to treat mosquito larvae using dsRNA in order to increase virus replication inside mosquitoes. To do so, the present inventors designed dsRNA sequences to target specifically MYD88, Rel1A and defensin anti-microbial peptide. FIGS. 3A-D illustrate mosquito-signaling pathways that have been implicated in the antiviral defense, namely the Toll, immune deficiency (IMD), Janus kinase/signal transducers and activators of transcription (JAK-STAT) and RNA interference (RNAi) pathways.

[0300] It has been shown previously that FHV replicates in four species of mosquito, including Ae. aegypti. In this study, FHV growth was first monitored in Ae. aegypti mosquitoes at different intervals (2 hours, 3, 5, 7, 11 and 13 days) following an infectious blood meal or infectious sugar meal. The virus titer was high in both methods of infection 2 hours after infection and decreased thereafter until day 7 (FIGS. 5A-B). However, only in the group infected with blood meal, the virus titers rise again 11 and 13 days postinfection (FIG. 5A).

[0301] In order to evaluate the activation of immune response mechanism after FHV infection, the expression level of MYD88 and Rel1A were also evaluated in mosquitoes at different intervals (2 hours, 3, 5, 7, 11, 13 and 15 days) following an infectious blood meal. Interestingly, the mRNA levels of MYD88 (FIG. 6A) and Rel1A (FIG. 6B) increased at 7 and 15 days post infection, respectively.

[0302] It has been previously shown that MYD88-silenced mosquitoes (after intrathoracic inoculation of dsRNA into the mosquito) prior to dengue virus infection resulted in an increase of the virus load by 2.7 times compared to the GFP dsRNA control. On the other hand, cactus gene silencing reduced the extent of dengue infection in the midgut by 4.0-fold when compared to the GFP dsRNA control [PLoS Pathog. 2008 Jul. 4; 4(7):e1000098]. In the current experiment, third instar larvae were treated with dsRNA against MYD88 and Cactus. Larvae were reared until adult mosquitoes and then received an infectious blood meal. Using this approach, an increase in virus load was found two hours after infection in the MYD88, Cactus and AAEL007562 dsRNA-treated group (FIGS. 7A, 7B and 7E).

[0303] At later time point (15 days) Rel1A and cactus-treated mosquitoes displayed the highest mortality rates (FIG. 8).

[0304] Furthermore, MYD88 dsRNA-treated mosquitoes displayed a higher infection rate at 7 and 15 days postinfection (FIG. 9A). When the viral load was analyzed at 15 days postinfection, dead mosquitoes from MYD88 dsRNA-treated group displayed higher virus titer as compared with live mosquitoes (FIG. 9B). In addition, a decreased MyD88 expression level was detected in dead mosquitoes from the MYD88 dsRNA-treated group as compared to live mosquitoes (FIG. 9C). Similar results were obtained with Rel1A dsRNA-treated mosquitoes at 15 days postinfection (FIGS. 10A-C).

[0305] Although the invention has been described in conjunction with specific embodiments thereof, it is evident that many alternatives, modifications and variations will be apparent to those skilled in the art. Accordingly, it is intended to embrace all such alternatives, modifications and variations that fall within the spirit and broad scope of the appended claims.

[0306] All publications, patents and patent applications mentioned in this specification are herein incorporated in their entirety by into the specification, to the same extent as if each individual publication, patent or patent application was specifically and individually indicated to be incorporated herein by reference. In addition, citation or identification of any reference in this application shall not be construed as an admission that such reference is available as prior art to the present invention. To the extent that section headings are used, they should not be construed as necessarily limiting.

1. A method of controlling a pathogenically infected mosquito, the method comprising administering to a larva of a mosquito an isolated nucleic acid agent comprising a nucleic acid sequence which specifically downregulates an expression of at least one mosquito pathogen resistance gene product of said mosquito, wherein downregulation of said expression of said at least one mosquito pathogen resistance gene in said larvae renders an adult stage of said mosquito lethally susceptible to said pathogen, thereby controlling said pathogenically infected mosquito.

2. The method of claim 1, wherein said mosquito comprises a female mosquito being capable of transmitting a disease to a mammalian organism.

3. The method of claim 1, wherein said mosquito is of a species selected from the group consisting of Aedes aegypti, Aedes albopictus and Anopheles gambiae.

4. The method of claim 1, wherein said administering comprises feeding, spraying or soaking.

5. The method of claim 1, wherein said administering comprises soaking said larva with said isolated nucleic acid agent for about 12-48 hours.

6. The method of claim 5, wherein said larva comprises third instar larva.

7. The method of claim 5, further comprising feeding said larva with said isolated nucleic acid agent until said larva reaches pupa stage.

8. The method of claim 1, wherein said pathogenically infected mosquito carries an infection selected from the group consisting of a viral infection, a nematode infection, a protozoa infection and a bacterial infection.

9. The method of claim 8, wherein said viral infection is caused by an arbovirus.

10. The method of claim 9, wherein said arbovirus is selected from the group consisting of an alphavirus, a flavivirus, a bunyavirus and an orbivirus.

11. The method of claim 9, wherein said arbovirus is selected from the group consisting of a La Crosse encephalitis virus, an Eastern equine encephalitis virus, a Japanese encephalitis virus, a Western equine encephalitis virus, a St. Louis encephalitis virus, a Tick-borne encephalitis virus, a Ross River virus, a Venezuelan equine encephalitis virus, a Chikungunya virus, a West Nile virus, a Dengue virus, a Yellow fever virus, a Bluetongue disease virus, a Sindbis Virus and a Rift Valley Fever virus a Colorado tick fever virus, a Murray Valley encephalitis virus, an Oropouche virus and a Flock House virus.

12. The method of claim 8, wherein said protozoa infection is caused by a Plasmodium.

13. The method of claim 8, wherein said protozoa infection causes malaria.

14. The method of claim 8, wherein said nematode infection is caused by a Heartworm (Dirofilaria immitis) or a Wuchereria bancrofti.

15. The method of claim 8, wherein said nematode infection causes Heartworm Disease.

16. A mosquito larva-ingestible compound comprising an isolated nucleic acid agent comprising a nucleic acid sequence which specifically downregulates an expression of at least one mosquito pathogen resistance gene product in a mosquito and a microorganism or algae on which mosquito larva feed.

17. The mosquito larva-ingestible compound of claim 16 formulated as a solution.

18. The mosquito larva-ingestible compound of claim 16 formulated in a solid or semi-solid formulation.

19. The mosquito larva-ingestible compound of claim 18, wherein said semi-solid formulation comprises an agarose.

20. The mosquito larva-ingestible compound of claim 16, wherein said microorganism is selected from the group consisting of a bacteria and a water surface microorganism.

21. The method of claim 1, wherein said mosquito pathogen resistance gene is selected from the group consisting of a RNA interference related gene, a piRNA pathway related gene, an immunity related gene, a metabolism related gene, a cytoskeleton related gene, a cell membrane related gene, a cell motility related gene, an extracellular structure related gene, a post-translational modification related gene, a protein turnover related gene, a chaperone related gene, a signal transduction related gene, a proteolysis related gene, an oxidoreductase activity related gene, a transcription related gene, a translation related gene, a diverse related gene, a transport related gene, a cell-cycle related gene, an energy production and conversion related gene, a chromatin structure and dynamics related gene, a Toll related gene and a JAK/STAT related gene.

22. The method of claim 1, wherein said mosquito pathogen resistance gene is selected from the group consisting of AAEL003673 [histone H4], AAEL003689 [histone H4], AAEL003669 [histone H2], AAEL002610 [serine protease], AAEL005004, AAEL011455 [CTLMA12], AAEL007599, AAEL007585 [cathepsin B], AAEL017536 [holotricin], AAEL003603, AAEL007669, AAEL001702, AAEL017571, AAEL015312 [cathepsin B], AAEL012216 [cathepsin B], AAEL008418 [pyrroline-5-carboxylate reductase]), AAEL013857, AAEL000335 [lamin], AAEL003211, AAEL003950 [helicase], AAEL002422 [cytoplasmic polyadenylation element binding protein], AAEL015328, AAEL000652 [GNBPA2], AAEL009178 [GNBPB4], AAEL007064 [GNBPB6], AAEL003253 [CLIPB13B], AAEL001929 [SPZ5], AAEL011608 [PGRPLD], AAEL007696 [REL1A], AAEL015515 [CECG], AAEL004522 [GAM], AAEL015404 [LYSC], AAEL012471 [DOME], AAEL012553 [HOP], AAEL009692 [STAT], AAEL006949 [SOCS16D], AAEL006936 [SOCS16D], AAEL000255 [SOCS44A], AAEL000393 [SOCS], AAEL015099 [SUMO], AAEL011753 (r2d2), AAEL006794 (dcr2), AAEL017251 (ago2), AAEL007823 (Ago3), AAEL013235 (Spn-E), AAEL007698 (AuB), AAEL000709 (Cactus), AAEL007768 (MyD88), AAEL003832, AAEL007562, AAEL000598 and AAEL010179.

23. The method of claim 1, wherein said mosquito pathogen resistance gene is selected from the group consisting of AAEL007768 (MyD88), AAEL000709 (Cactus), AAEL007698 (AuB), AAEL003832, AAEL007562, Rel1A (AAEL007696), AAEL000598 and AAEL010179.

24. An isolated nucleic acid agent comprising a polynucleotide expressing a nucleic acid sequence which specifically downregulates an expression of at least one mosquito pathogen resistance gene selected from the group consisting of AAEL003673 [histone H4], AAEL003689 [histone H4], AAEL003669 [histone H2], AAEL002610 [serine protease], AAEL005004, AAEL011455 [CTLMA12], AAEL007599, AAEL007585 [cathepsin B], AAEL017536 [holotricin], AAEL003603, AAEL007669, AAEL001702, AAEL017571, AAEL015312 [cathepsin B], AAEL012216 [cathepsin B], AAEL008418 [pyrroline-5-carboxylate reductase]), AAEL013857, AAEL000335 [lamin], AAEL003211, AAEL003950 [helicase], AAEL002422 [cytoplasmic polyadenylation element binding protein], AAEL015328, AAEL000652 [GNBPA2], AAEL009178 [GNBPB4], AAEL007064 [GNBPB6], AAEL003253 [CLIPB13B], AAEL001929 [SPZ5], AAEL011608 [PGRPLD], AAEL007696 [REL1A], AAEL015515 [CECG], AAEL004522 [GAM], AAEL015404 [LYSC], AAEL012471 [DOME], AAEL012553 [HOP], AAEL009692 [STAT], AAEL006949 [SOCS16D], AAEL006936 [SOCS16D], AAEL000255 [SOCS44A], AAEL000393 [SOCS], AAEL015099 [SUMO], AAEL011753 (r2d2), AAEL006794 (dcr2), AAEL017251 (ago2), AAEL007823 (Ago3), AAEL013235 (Spn-E), AAEL007698 (AuB), AAEL000709 (Cactus), AAEL007768 (MyD88), AAEL003832, AAEL007562, AAEL010179 and AAEL000598.

25. An isolated nucleic acid agent comprising a polynucleotide expressing a nucleic acid sequence which specifically downregulates an expression of at least one mosquito pathogen resistance gene selected from the group consisting of AAEL007768 (MyD88), AAEL000709 (Cactus), AAEL007698 (AuB), AAEL003832, AAEL007562, Rel1A (AAEL007696), AAEL010179 and AAEL000598.

26. A nucleic acid construct comprising a nucleic acid sequence encoding the isolated nucleic acid agent of claim 24.

27. A cell comprising the isolated nucleic acid agent of claim 24.

28. The cell of claim 27 selected from the group consisting of a bacterial cell and a cell of a water surface microorganism.

29. A mosquito larva-ingestible compound comprising the cell of claim 27.

30. The cell of claim 27, wherein said nucleic acid agent is a dsRNA.

31. The cell of claim 30, wherein said dsRNA is a naked dsRNA.

32. The cell of claim 30, wherein said dsRNA comprises a carrier.

33. The cell of claim 32, wherein said carrier comprises a polyethyleneimine (PEI).

34. The cell of claim 30, wherein said dsRNA is effected at a dose of 0.001-1 μg/μL for soaking or at a dose of 1 pg to 10 μg/larvae for feeding.

35. The cell of claim 30, wherein said dsRNA is selected from the group consisting of SEQ ID NOs: 1315-1324 and 1330.

36. The cell of claim 30, wherein said dsRNA is selected from the group consisting of siRNA, shRNA and miRNA.

37-40. (canceled)

41. The method of claim 1, wherein said isolated nucleic acid agent is comprised in a cell.

The application's sequence listing, which the Patent Office published only in electronic form, follows.

SEQUENCE LISTING (1330 sequences)

SEQ ID NO: 1 - DNA, 1161 bp, Aedes aegypti
atgaaatttgttttaataatcggctgccttttggcagtggcactagccgaggaaagtgccccgaagtgtgtagcgtcgcctacaacagctagcggcagtcaagcccgcgctggcccgtactgttcgggagatctgatcttcgaagataactttaactttttggacttcgagaagtgggaacatgaaaatactctcgctggtggtggtaactgggaattccaatggtataccaacaaccgtgcgaattcttactgcgaaaatggtatcttctatatccgtcctacattggttgctgacgatactggtgaaggtttcttgagcagtggaactttgaacctccatggaggtcaaccggctgatcagtgcactggtccattcttctggggttgtgaacgtgctggcaatcccagcaatatcataaatccaatcaaaagcgctcgagtacgaactgtggattcgttcaacttcaagtatggtcgtatggaagtcagagctaaggtaccaactggtgattggctttggccagctctttggctgttgccgaaacgacaggtctatggatcgtggcctgcctctggtgaaatcgatttgatggaatcacgtggtaacattgactaccgtaatggaggagtacacattggtgttgaacaggttggttcaactttgcactttggacctaatccggatcaaaatggttgggctactactgttgcatacagaaattccgctgccggccaaggtttcaacaacggcttccatttgtaccaactcgagtggaccccagatcatattacatttagcgtagataaccaggtgcttcgacgcaatgatgctggttctggattctgggctaagggtggttttgttactacttcaccggcttccgagaacccatggatgcatgctactacaatggctccgtttgatcaagaattctacatcatcatgaatttggccatcggaggaaccaacggttacttccccgatgttccgccagcaaccaatggcgctcgtggtaagccctgggcaaacacttcaccaactgcggcacgtgatttctggaatggcaggaattattggctcccgacctggcgcatggcggaaaatagaggaaaggaatcatcgttccaggtagactacgtgcgagtatgggctttgtag

SEQ ID NO: 2 - DNA, 1257 bp, Aedes aegypti
atgatcgtatcgtgtagattatggccggtggtgttgatagttgcctccgtcgccacttccctcgcaaccggtgccgaagtggaagcggtcgatgctaccgagactagatcaggtttcggagcaggtggtggtggtggtcgtgctccggtgacactgaaccgagatcgcaacaagtgcgtactttcgccaaccacggccagcggaagcatgatccagcgcggtcgcaccttttgcagtggggacctaatcttccaggataattttaacttcctggattttgaaaaatgggagcacgagaatacgcttgccggtggcgggaactgggaattccagtggtacacaaacaaccggtcgaattcattcgttgagaatggcaccctttacattcgtcccacgctcacggctgatgagtatggcgagcacttcttgtcctctgggactattaacttgcgtggtaatcaccctgttgaacaatgcaccaacgcggcattctggggttgcgagcgcgcgggtacaccaacaaacattctgaacccggtcaagagtgcccgcctccggacgctttcgtcgttcaacttcaagtacggtcgggcggaagttcgcgccaagcttccgtctggggattggttgtggccagcgatttggttgcttcccaagcgaaacgcttatggaacgtggcccgcttccggggagatcgatctgatggagtcacgtgggaatgagaatcttacggtggacggggttcagattggcacccgtcagtttgggcagacgctgcactttgggccgaatccgtcccataatgggtacaatacggccacgcggacgaagaatgctgaaccaggggaagaatacagcaaggggttcaacgtctacgggtttttgtggtccccggacaacattacggtcagcatcaacggggagaatgtggcaacttttgaaggtggagaaggattctggaagcgagctggattcgataagctgaacatggagaacccttggcgatatggtagcaagatggcaccgtttgatcaggagttccactttatcttgaatctggcagtcggtggggtgaacggatattttccggataatggagataatccgggtggtaaaccgtggaagaacagttcaccgcaggcggcaacggatttctggaatgggcgcgagaattggttgcctacgtggaatctggacaagaacgatgggaaggatgcttctctgcaagttgactacgttaaagtgtgggctttgtga

SEQ ID NO: 3 - DNA, 1185 bp, Aedes aegypti
atgttacttccccgaggaagtattgctctgctggtggccttggtggcaatattgaatgttgtgcaagcggatttcggttacaacagaaaatattgcaagaagccttctgttacaactgctagtggatcctcagtttatcgaaagactttctgctctggtgatttgattttcgaggacaatttcgataaactgaaccttgaaaaatgggaacatgagcacacacttggtggtggaggtaactgggagtttcagtactacctgaacaatcgtaagaattcgtatgtagaaaatggaatactgtacattcgaccaaccttactagctgatgaaactggtgaggagtttttgaccagcggaacattgaatctgaacgggggttctccatatgattcttgtactaacccagcgtgggatggttgtgaaagaactggcactccagaaaatcccttgaatccgatcaaaagtgctcgtctgcggacattaaaatcgttcaatttcaaatatgggaagttggagatccgcgcaaaactaccaacaggcgactggctttggcctgccctttggctgatgcctaagctcaatcaatacggaacgtggccgacttcaggagaaatcgatctgatggaaagtcgaggaaatctggattaccgtgttgcggatggaacccatattggcgttgagcaagtaggatcgactttgcatttcgggccaaacccatcactgaatggttttgagacttccactgcggctaaaaatagtgccccaggagaaggcttcaacaatgacttccatcgttaccaacttgaatggacacctgagtatatgaaattcagtgttgatgatgaggaaactctggtagtggatggaaatttctggcagcgaggtaatttcgatcagagagcaccgggaacaccaaatccttggatcagcggaggaaagatggctccgttcgatgaagaattccatgtcatcatgaacctggccgtcggaggtacaaacggatatttccctgaccctccagcgacaaacaaagacaatcctaaaccgtggacgaatggatctccaactgctaggggtggattctggtctgccaaggaagattggttacccacctggaagcttgaggaaaatgatagcaaggaagcttctttgcaagtcgattacgtcagagtatgggccctgtaa

SEQ ID NO: 4 - DNA, 1512 bp, Aedes aegypti
atgagacatcttctgtatagtgtagtgattgtttgcctaattgtacaagtgaattatgtctcggcacaagaattttctattcctgatatagaatttgaattcttgaaaccgcgtggcttccgagccagcattcccgacgttcccggaataaagctgttcgcctttcatgctcgcattaacaagccgttccagcagttcgaagaaggtgattatgcggatgacataacggaaccgtccgaggatggtcgttgggtatttgagaccacgaaagccaccatcaccgatgaccaaactgtccactattgggtatacgttcagcacgaggatcgttcctattggttggccaatcagaagcagaagcggaaagcagctttaaaaactactacgacgacaacaacgacgactacaacggtgaagccgaaggcgaccaaaacgacaaaaccgtccgaaaagagcactacaaccaccgaggcaccatgtgccccaaccgttaccaccgtgaatgggaaacccagttgcgctggacgaatggttttcgaggataccttccaaacgtttgacttgcagaagtggcaacgggaggtgcgaattcctttggatacggagtcggccgagtttttgtcctatcaggaatcaccggaaaacagctacgtcgccggggggcacctgttcatcgtgccgacgctgctcaacatgaatccggacttcaacgaggaacgcatccgaaccggggagctgatcctttccggctgcaaatcacccaccaacaatgagtacgagtgtcgccgaagggcagccctgtccaccatcctgccgccggtggtttccgccaagctgaacaccaaaaacagttttcgctttcgatacggtcgagtggagattcgtgccaagctgcccaagggggattggatttttccacagttactgctccaaccggcagaaaattactatggctatgcggatttggcttcggggatgctgatggtggctcacgtcctgtccaatgagcatctgattacgcgggaaggcatcctcgttgatgggcatcggttgcgaggtggtgccattttaacgaccaaacccaaactgcgggatgcttttctgaaggcgaacgttttggacgagcatttcagcgataactttcatacctatggacttgtgtggaagccggacagcatcgctctgaccgtggatggattccagtatgctaccctgagggatcggttcaagccgtacggtgcggccaacaatttgacccaggcgaatttgtggaatccggacaatgccatgtcaccgtttgatcgagagttttacatatcgcttggcgtgggagtcggaggtgtcacggattttcccgattcgagcatgacgggtccgttgcggcagccaaagccatggaacaacaccagcccgaaggcggagtactttttctaccagaataggaacgtgtggtttcggacgtggaccgatccggagctgaaagtggattacgtgcgagtgtacgcgctttga

SEQ ID NO: 5 - DNA, 1488 bp, Aedes aegypti
atgacgccacgaagaaatcctcgatatcgtcctccgaagccacggttcgaagtttacaaccctaaaggtctgatcgcgtcgattcccgccgaaccgggcattactctgttcacgtttcacggcaagttgaacaaacgtttcgaagatgagtacgaaattggtcggtgggccaaatccgtttcccaaccgcgtaacggtcgattcacgttcgtcgatcgaaaagcggaactacaacccggggatgttatctactacaaaacggtgattacgcacaacggcgtgacgtaccgtgggaactacggagtctatgaggtcacacgtttcacaggaaacactccaggcagtgatggtggtggccggaaaactacaactactagcacattgccaccgtttgtgtataagaataatgaacgacggacaaaaggagtcgatcaggacacgactagaacgatttcaacgcaaaccagtgcagaagatttggactacaaagaatgtgatagggcgcgaactcaagtaaatggtagaaaagtttgcagtggaaagctgatattcgaagaaacatttgattccaaagagctcaacgggcaaaagtggcgaatcgagaaccgcttcgcatccgatcccgataacgagtttgtggtttatgccgatttcaaggaaaacattcaaatacgtaacgggaaactaaacatccggccatcgctgttcgaaagcaaatttggtccaggatcgaccaacaccaagtttatgtttgcagcggagtgtacggggctgttgaattctcgcgattgcatccgagatcggaagatagatttcgatatgattcctccggtgctgtccgcgcaaatctccacgttcaactcgttcaagtttctttatggaaagatattgattcgcgctaagctcccacgaggcgattggatttttccacaactgtatctcaaacctagcaatgaattttatggtcgtgacgaatatgcttcgggtctaatgcgcgtagcctacgctcctggaggtccaaaattgcgaaaccagttatccggaggattgatactgaaccatgccgaacccctccgatgctccaagatgtgcactctaaccagacccagaaactggaacgatgacttccacgtgttcgggctcacgtggagcccggaaggagtgtacatggaagtggacgatgaagtgtactgtcatattgacccggaagaaggcttctacaacgaggtgaaagcgacgaaaccgcaatttgcaaacctttggagattgagcggtaatcgaatggctccgttcgataaggagttcttcattagtttgggcgtcggtgtgggtggtcactacgacttccacctatttcaggacaaaccgtggaaggatttgtccgtcaaggcgatgcacacgttctggagcgcgcgggggaattggtattctacgtggaacagtaatagtactttgcaagttgattacgttaaagtgtttgcgatataa

SEQ ID NO: 6 - DNA, 1200 bp, Culex quinquefasciatus
atgcactgggccatgtgcaagcttgaacactcgggaaatccggcgatatccgaactcctcggaattcttactcattcctgtcagtacgatcgcgaccttcaaaccgagctcaagatgcccgcgaggctccaacttcaatttgttcttttaatattcatcggtagtgctctagtagattccactccccgaagatcttcccgctaccgtccaccaaagccacgcttcgaggtgtaccaaccgcgtggtttgatcgcttggatccctgaagaagccgggatcactctgttcggattccacgccaagctgaaccaccgcttcgaggacgagtacgagattggccgttgggccaagacgctgactcagccccggaacggccgcttcgtgttcgtcgaccggaaggccgagttgaaggtcggcgatacgatctactacaagacggtgattacgcacaacggcgtgacgtaccgtgggaactatggcacgtatgaggtcaccaggtttaccgggtctacaccaggggtgggtggcggaggtcggaaaacgactacgtcaacgacgctgcctccgtttgtgtacaaaaacaacgaacggcgaacgaaaggcgtagatccggatacgtacgtgccactagggccgttcgattacgaatccaaagagttccaatccccacccttgatccgaactcggacaatctccacgcaaaccagcgccgaagagctgggctacaaagagtgtgatcgtgcgcgaaccctggtcaacggtcgcaaagtgtgcagcggcaagctgatcttcgaggaaacgttcgaaggtcgctccctgaacgaacaaaagtggcgcatcgaaaatcgcttcggctcggatccggacaacgagttcgtcgtgtacgccgacttcgacgagaacatccaggtccgggaggggaaactcgccatcaagccgaccctgttcgagagcaagtttggcccgggctcgaccaacaccaagtttatgtttgccgcggagtgtacgggcgtgttgaactcgcgggattgcatccgggatcggaagattgactttgatatgataccgccggcgctgtcggcgcagatatcgacgttcaactcgttcaagttcatgtacgggagggtggtgattagggcaaagttgcccaagggggattggatatttccactcatagctcaccaagctgcgatggcctag

SEQ ID NO: 7 - DNA, 1356 bp, Culex quinquefasciatus
atgttcccgcagtttgaggaaggagactttgccgaggatgttctggaaccgaatgccgatggtaactgggtttacgaaaccaccaaagccaacgtcccggaggggcaatccatccactactgggtttacgtccagcacgaggatcgcccgtactatgcaacaaacttaaaggagctcataagaaaaaatcccgtcacaaccacaacgacgacgacaacccaaaagccgaaggcagtgacaaaaacgccgaaagaaggaaaaacgaatggtaaaagcactagtactacgaccacgactacgacgacgaccctaccaccgtgtgaacctacggtgaccaccgtgaacggagggcgatcaacctgcgccgggaagctgatcttcgaggatactttccagtcgctggatttgaccaggtggcagcgtgaggtgcgcattccgctggatacggagtcggcggaatttgtgtcctaccaggccacgccggacaacagctacgtggccggaggtcacctgttcatcgtaccaaccctgctcaatctggatccggactttagcgacgagcgcatccgcaccggtgaactaatcctggccggctgcgtttctcccacgaacaacgagaacgagtgccggcgtaaagcggccctggccaccatcctgccaccggtggtttcggccaagctcaacacgaagggaaccttccgcttccagtacggccgggtcgagatccgggccaagctgcccaaaggagattggatttttccacaaatcctgctccaaccagccgaaaactactacggctacgccgacctggcctccggaatgctgctggtggcgcacatcctatcgaacgaggaactcgtcaccggcgacggggtccggatcgatggccatcggctgcgcggtggacccatcttgacgaaccgcgccaaacttcggatggcctcgctcagggcaaacgttctggaggagcactttagcgacggcttccacgtgtatgggctggtctggaagccggacagtattgcgctgacggtggacgggtttcagtacgcgaccattagggggaagtttaaggattacggcacgagcaacaacttgacgcaagcgaacctgtggaatgaggcgaacgtgatgtcaccgtttgatcgggagttttacatttcactcggagttggcgtgggtggagttacggactttccggacggttcccgaacgggctcgctgaagcaacccaagccgtggaacaataccagccccaaggcggagtacaacttttaccagagtcggaacgtttggtaccggacgtggacggaaccggagctgaaggtggattacgtgcgggtttatgcactgtga

SEQ ID NO: 8 - DNA, 1194 bp, Culex quinquefasciatus
atggggttcctagaccgcaaaagtctaatctacttggccatcatagtggccctgtcggtagctctgattgccgtgtgcatcgacgcgtacgcgagtcccgccgccgctcctcagcgggacactccggatgacgggttgaagtgtgggcaggcttcggtcacgacggccagcggatcgttggtagaccggaaagcgttctgtcccggagagctgctcttcgaggacaactttgacaccctggatctggacagaactgggagtctcaaccatcgagataactcgttcgtcgaggatggtgtgctgtatcttaagccgacgttcattgggcttgaacctggcggtgaggagtaccttaaaactggaaagctggacatcaacggtggtgatccggggaatttttgcacgaatcccgcgtgggacgggtgcgtccgaaccggaacccccgaaagcattctcaaccctgtgaagagtgcccgcattcggacggcgcactcgttcaacttcaagtacggaaagctggaaatccgagcaaaactgccaacgggggattggatgtggccagcgctgtggcttatgccccgaacgaaccagtacggcacgtggccggcttcgggcgagattgatctgatggaggcccgctgcaatgtggactatcgtgacgaagaggggactcatctgggggtagaacaggttctgtcgacgctgcactttggacctaacgcttggacaaacgcgtacgacacctcaactgctccgaaaaattcggcttccggacagggattcaacaaagactttcaccgctaccagctggagtggactccggagtttatgaagttcagcgtggacggtgagcacatcctgcaagtggatggaaacttttggcaaagaggcaactttgacgagcgagctcccggaacgagaaatccttgggtcagtggaaccaagatggcgccgtttgatcaggaattcttcattattttgaatctggccattggtggaactaacggttacttcccagatgagaaggtagtgaatactaaacccaaaccatggtcgaaccagtcaccagttggacctgccatgactagtttctgggagaaaagggacgattggctgcccacgtggaaccttgacataaatgatggcaaagacgctgccttccagattgactacgtgagaatttgggctttataa

SEQ ID NO: 9 - DNA, 1218 bp, Culex quinquefasciatus
atgatcttgtggctatcagcgctggcgttgaccttcacggtcacggtcggcgccggcaacgggccggattcggtgacgctggtgcgcgatcgcaagccgtgcgtcaaatctccgacgaccgccagcgggagtgcgatccagcgcgggcgaaagttctgcagcggcgagctgatcttcgaggacaactttgacttgctggactttgaggtctgggagcacgagaatacgctggccggcggtgggaactgggaattccagtggtacaccaacaatcgatccaactcgttcgtcgaggatggcgtcttgtatctgcggccaacgttgacggcccacgagtacggccacgggttcttgacctctggtacggtcgatctgcagggcaatcgaccggttgagcaatgtacgaatgctgcgttctacggatgtacccgtacgggaacggagactcacgtgctgaatccggtgaaaagtgcccgccttcggacgcttccctcgttcaacttcaagtacggtcgggctgaggtccgtgccaagttaccctcgggagactggctttggcctgcaatctggttgctaccgaagcgtaacgcatacggaacgtggccggcgtccggtgagatggatttgatggagtcccgcggtaacgagcagctgactgttgatggagtgcagatcggaactcgccaagtcggacagacgctccactttggaccgaatccttcgcacaacgggtggaacacggctacgctaaccaagaacgcccttcccggaaaggagtacagcaaggaattcaccacgttcggtttcacgtggagtccggagaacattaccgtcagcatcaacggggaacagctgtcggttatggaagcaggagatggattctggaagcgggcaggtttcgacaagctgaacatggagaatccctggcgttacggaaccaaaatggcgccgtttgatcaggagttccacttcatcttgaatttggccgttgggggagtgaacgggtatttcccggacaatggacagaacccgggagggaaaccgtggaagaatagctcaccgcaggcggcgacggacttttggaacggacgggacaactggcttcccacgtggaacttggataagaacgatgggaaggacgccgcactgcaggtggattatgtcaaagtttgggctttataactgtgactgatttaataaatttccattgacgatcaa

SEQ ID NO: 10 - DNA, 1239 bp, Culex quinquefasciatus
atggggtttctggatcggaagagtctggtgtttttggccattatagtggccctctcggtggcactgattgccgtgtgtattgacgcgtacgccggaggagaagacgagaaaagagatccacagcgtgatacgccggaagagttaaagtgcgaaaaggcttcggttacgaccgccagtggatcgttggtggaccggaaagcattctgctcgggtgatctcatcttcgaggacaactttgaccggttggacttggaaaggtggcagcacgagcacacccttggaggaggtggtaactgggaattccaatactatttgaacaaccgtcaaaactcgtacattgagaatggagtgttgtacctccggcctacgctgctggttgaaggagatgacgacagtttcctgaccagtggaactttggatattaacggtggatctccccacgactactgtaccaatcctgcgtggtacggatgtttccgcacgggatcgccaatgaattacctgaaccccgtcaagagtgctcgtgttcgcacggtcaactcgttcaacttcaagtatggcaagctggaaatccgtgtcaaaaaccccaccggagattggctgtggcctgcgctttggcttatgcccaagatgaaccagtacggcacgtggcccatgtctggtgaaattgacctgatggagtcgcgtggtaatctggagtatcgtttccccggtggagaacatctgggtgtggagcacgttggacaaactttgcactttggacccaccacgtggttgaacggttatgaaactgcaacgacagcgaagaactccccggctggcgagggcttcaacaaggacttccaccgctatcagctggagtggactcccgagtacatgaaattcagcatcgatgacgagcaacagatgttggtggaaggaaacttctggaatcgtggaaactttgaggaacgtgcaccgggaacgcccaacccgtgggtcagcggaggaaagatggctccgttcgatgaggagttctacatcatcatgaatctggcgaccggtggaactaatggatacttcccggatgcacctgctatgaacagtggtaagccgaaaccctggagtaatcaatcccctacggccatcagagagttctggtcggccaaggccgattggctgccgacgtggaagctgaacgaaaacaacagcaaggaggcatcactgcaagtggattatgtcaaggtttgggcgctgtaa

SEQ ID NO: 11 - DNA, 1164 bp, Culex quinquefasciatus
atggcagccaaaagttggaaatttgcactgtacagcgcaattttagttctctcctgcgaggctcgcccaaaccgcgaatgcaagacaccttccgtgacaaccgccagcggtgctctggtctcgcggtcttccttctgtccgggcgaactcatctttgaggacaacttcgacacgctggatctggaaaggtggcaacacgaaaagacactcggaggtggtggtaatggcgagtttcagttttatctcaacgatcggcagaattcgtttgtggaggatggcattttctacatccgtccgacgatgctgactgaagatgaggactttttgagaagcggaacactggatgttaatggggggtcgccttatgatcactgtaccaaccccgcctggaatggatgcgttcgtataggaactccggactttttgctgaatccagtgaaaagtgcacgtgttcggacggtcaattcgttcaacttcaagtatggaaagctggaaatccgggcaaaagttccgaccggtgactggctttggcccgcgctgtggatgatgcccaagctggaccagtacggaacgtggccgagatcgggtgagatcgatctaatggagacgcggggtaatttgaactatcgctatgtcaatgggacacacctcggagtggagaatctcttttctacgctacactttggacctgaaccgtggtacaacgcgtacgaaacgtcaacggcccacaagtacactgcgcctggagaaggattcaacaacgactttcaccggtatcagctggagtggactcccgagtacatgaagttcagtatcgacgatgaacagtttttgctggttgacggtaacttttgggaacgtgggaactttgtagatcgtgctccaggcgcaccaaacccatgggttagtggaggaaagatggctccgttcgatgcagagttccacattatcatgaatttggcaattggagcagcgggaggatatttcccggatgaaccagttgcggtgaatgatcctccaaagccgtggaagaacgggtcacccacggcaatcaaagagttctgggaggctaaggatgagtggcttccaacatggaagttagacgaaaacaatgggaagggagcttcgcttcaagtcgactatgtgcgggtttgggcgttgtaa

SEQ ID NO: 12 - DNA, 1161 bp, Culex quinquefasciatus
atgaagttcgtcgtagtgttggcgtgcctgttggcggccgccctagccgaagaaggctccccgaagtgtacaccctcaccaaccacggccagcggatcccaggctcgggctggcccgtactgttccggagatttgattttcgaggataactttaaccatttggactttgaaaagtgggagcacgagaacaccttggcgggtggtggcaactgggagttccagtggtacactaacaaccgagcaaattcgtactgtgagaatggcatcttttacatccgtccgacggctgttgccgacgatactggcgagggctttctgagcagtggaaccttgaacattcatggaggacagcctgcggatctatgcacgggaccattcttctggggatgcgaacgagctggaaatcccacgaacatagttaacccaattaagagtgctcgtgtccgtaccgtggaatcgttcaacttcaagtttggtaagctggaagtgagagccaagatgccaaccggagactggttgtggcccgcggtttggctgttgcccaagcgtcaggtttacggctcctggccagcttctggtgagattgatctggtcgagtctcgtggcaacttggattaccgtgtcaacggagttcacattggtgtggaacaggtcggatcgacgctgcactttggcccgaatccgaaccagaatggatatgataccacattgagctacaagaacagtggaccaggtcaaggtttcaacaccgggttccatctgtaccagctggagtggactccggaccacatcacgttcagcgttgacaaccaggtgctgcgccgtattgacgctggaaccggtttctggtccaggggtggattcgtaacgacatcgcctgcatcggagaacccgtggatgcacgcgtcggtgatggctccgttcgatcaggagttctacatcatcatgaatctggccgttggaggtaccaacggattcttcccggatgttcctccggcaaccaacggcaaccgtggcaaaccgtacagcaacaattcaccagccgctgctcgtgatttctggaatggtcgcaacatttggcagccgacgtggcagatgaacgtcaaccggggcaaggaatcgtccctgcaggtggattacgtccgagtttgggcactgtaa

SEQ ID NO: 13 - DNA, 1065 bp, Culex quinquefasciatus
atgcccgcgaggctccaacttcaatttgtgcttttaatattcattggtagtgccctagttgattccactccccgaagatcgtcccgctaccgcccaccaaagccacgcttcgaggtgtaccaaccgcgtgggttgatcgcttggatccctgaagaagcggggatcactctgttcggattccacgcaaagctgaaccaccgcttcgaggacgagtacgagattggccgttgggccaagacgctgactcagccccggaacggccgcttcgtgttcgtcgaccggaaggccgagctgaaggtcggcgatacgatctactacaagacggtgattacgcacaacggcgtgacgtaccgtgggaactatggcacgtatgaggtcaccaggtttaccgggcctacgccgggggttggcggaggaggtcggaagacgactacgtcaacgacgctgcctccgtttgtgtacaaaaacaacgaacgtcgaacgaaaggtgtagatccggatacgtacgtgccactaggaccgttcgattacgaatccaaagagttccaatctccacccctgatccgaactcggacaatctcaacgcaaaccagcgccgaagagctcggctacaaagaatgcgatcgagcgcaaaccttcgtcaacggtcgcaaggtgtgcagcggcaagctgatcttcgaggaaacgttcgaaggtcgctccctgaacgaacaaaagtggcgcatcgaaaaccgcttcggctcggatccggacaacgagttcgtcgtgtacgccgacttcaacgagaacatccaagtccgcgacgggaaactcgccatcaagccaaccctgtttgagagcaagtttggcccgggctcgaccaacaccaagtttatgtttgctgcggagtgtacgggcgtgttgaactcgcgggattgcatccgggatcggaagattgacttcgacatgataccgccggcgctgtcggcgcagatatcgacgtttaattcgtttaagtttatgtacgggaaggtggtgattagggcgaagttgccgaagggggattggatatttccacgtaattaa

SEQ ID NO: 14 - DNA, 1182 bp, Culex quinquefasciatus
atggttccattttttggttggaaacgacttcttggattggcgcttatcgttgtaaccatcaacgcgcatcctaacgaataccacaatggctgcaaacttccttccgtaactacggccagtggatccgctgttaaaaaatcgtccttttgctctggagaacttattttcgaagacaacttcaataagctggatttggaaaagtggcaacacgagcatactttgggaggtggcggtaacggcgagtttcaatattatctgaacaatcgccaaaactcgtacgtggaaaatggcatcttctacatccgtccaacgctgatagctgatgaagccggtgaagatttcctgaccagtggaactttggatgctcacgggggttctccttatgatttttgcacgaaccctgcttggaacggatgtgttcgcactggaactcccgactttcttctgaatccggtaaaaagtgcacgcgttcgtacggtcaattcgttcaacttcaagtatggcaagctggaaatccgcgccaaaacaccaactggtgattggttgtggcctgcgctatggcttatgcctaagcttaaccagtacggcacgtggccaacgtccggagagatcgatctgatggagacgcgtggaaatttggactaccgcttcccggagggaggtcaacttggtgtggaacacgttggtcaaactctgcattttggacctaacccttggaccaacgggtacgaaacatcaacagctgtgaagtattcatcggccggagaggggttcaacagggactttcaccgctatcagctggagtggactccggagtacatgaagttcagcgtcgatgacgagcagctgctattggtcgacggcaacttttggaatcgtggaaactttgaggatcgcgctcctggaacgcctaatccatgggtcagtggaggtaaaatggcaccgtttgatgaagagttctacatcattatgaatctggcgattggaggtacgggagggtactttccagatgcacccgccatgaacggggaaaagccgaagccctggatcaacagttcaccgaaagcgatcaaggaattttgggaagcacgagaggattggttgccaacgtggaagttggatgagaataacagcaaggaagcttcacttcaggttgattatgtgagggtttgggcgctttaa

SEQ ID NO: 15 - DNA, 1245 bp, Anopheles gambiae
atgaggtcctttttcgaccgcagaacgatcccgctgctggtgattattgtgggactgtcggcggccctgattgccgtttgcatcgatgcgtacgccggtgacgacgacgaggtcgagcgtcctgccgtgcccgatggtgaggcaccgctcgcgtgtgatcgtgcctcggtaacgacggccagcggtacgctggtgaagcgcagtgccttctgtcccggcgatcttatctttgaggacaatttcgaccggctggatctggagcggtggcagcacgaggttacgcttgccggtggtggtaactgggagttccagtactacctgaacagtcgccgcaattccttcgtcaaggacggcatcttcttcatccggccaacgctgcttgccgacgaaacgggagaagagttcctttcgagtggcaatctgaacgttcacggtggcacaccgtacgatttctgcacgaacccctctaactatggctgcgagcgccagggcagtccaacgaactacctcaacccgatcaagagtgcccgcgtgcgcacggtgaactcgttcaacttccggtacggcaaggtggaaatccgtgccaaaatcccgaccggtgactggctgtggccggcgctgtggctcatgccgaagattaaccagtacggtacctggcccagctcgggtgagatcgatctgatggaaagccgcggcaatcttgactacagcgtgaacggtaatcagctcggcgtggagcacgtcggcacgacgctacactttggcccgcagtgggacctgaacggttacgaaatggcaacggcggtgaagaactccccgaaggggcaaggtttcaacaagggcttccatcgctaccagctcgagtggacacctgagttcatgcgcttctcggtggacgatgagcaggtgatgcaggtggagggcaacttctgggagctgggtcgcttcgacgagcgtagaccgggcgtgcagaacccgtgggtgacgggcggtaagatggcaccgttcgatcaggagttctacatcatcatgaacctggcggtcggcggaacgaacggattcttccccgatgtgccgccggcagtgaacgccaacggcaacaagccgtggtcgaacaactcgcccaccgcactgcgcgacttctggctgggccgctcggactggctgcccacgtggaagctgcaggagaacgacagtgctgaagcttcgttccaggtggactatgtgcgcgtgtgggcactgtag

SEQ ID NO: 16 - DNA, 1353 bp, Anopheles gambiae
aaaagtagtcgctatcagccgccaaagccccgatttgaagtgtttgatcccaagggattgattgtgtggattaacgctgatccaggaattagttcgtttacatttcacgggaaacttaatcagcagtttgtacagaattacgatgttggacgatgggctcagacaataattaaaataaaaaacggccgataccttttcatcgatcgcgaagcaaaactcgtaccaggtgataccatattttatcgtacagtgattgttcgtaacggacagacctaccgtacgaattccggagcgtttaccgtggaagagctgcgtccggccgctacaccttcacccacatccacttccgctgaacattgcgctaatgcacaaaccattgtaaatggacgaaaagtgtgtgctggtaaactgttgtttgaggataattttaatggtcgttcgatagatttgcgcaagtggcgcattgagaaccgttttgcatctgaccccgacaatgaatttgtggtttatgctgatttcccagaaaatataatgatacaaaatggtctattagctatccgccccactctgttcgaggaaaaatttggaccaggtgcgacgactcagcagtttaggtttggcgaagagtgcacgggccatagcagttcgcgggactgtatccgagacacgaagattgattttgacatgattccgccggtacttacagcccagattacaactataactagctttaaatttacatttggaaaggtgttgattcgggcaaaattgcctgagggtagttggatttttccacagctatatatcatccctgccacggacttttatggccaagacagttatgcttccggattaatgcgcattgcatttgtacctggtggaccgcagttcaggaatcaactatccggtggactgcttgtgagcgacagtgaacctttgcgctgctctaaaatgtgcactttgaacaaaaatgtccaatggagttctgattaccacgtgtatgggctgaagtggactccagaaggagtatggatggaagtggatgatgaggtgtactgtgccattgatcctggagaagggttataccgaaccattcagtctagaaagcctcaaattgcaaatctgtggcaattgagcggatcccggatggctccgttcgacaaggatttctatcttggtcttggagtaggtgtgggaggtcattatgatttccatcaatttaacgggaaaccttggaaagatttaggagtaaaagccatgtttaccttttggaaagctagagacaagtggtatcctacttggaatgtgaatagtaccatgcttgtcgattacgttcgcgtgtttggtgtttaa

SEQ ID NO: 17 - DNA, 1570 bp, Anopheles gambiae
gtcgtcccagtgtttggtaggggacgaatgattacggctcattaccggggcagcatccaaaacgggtaccggctattgaacattgtgtgagggtgtgtgtgatcaagttgagggaattaaaaaggggcttttcattatgcagcttgtgcgtgtgcgattgttgatcgggtcgttgctactagcaaccgtgggtgactgggtggaagccgtcgatgaatcaacaagcacggctagtacagcgcaaagtgagtgtgtacggtccgttacgacggccagcggaagtttgatcgaccggggacgcacgttctgcagtggcgagcttatttttgaagataatttcgatttcttcgactttgaaaagtgggaacacgagaatacgctagcgggcggtggtaactgggagttccagtggtacaccaacaatcggtcgaactcattcgtcgaggatggtgcactcaacatacgcccaacactgacggcggaccagtttgggctagatttcatgacatccggcacgctgagcctgcagggcagttatcccacggaccactgcacaaacgatgctttttacggttgcgtccgcgtcggcaatcggcagcacatcgttaatccggtgaagagtgcccgcatccgtacgatcagctcgttcaatttcaagtacggccgggcggaggtgcgcgccaagctgccgacgggcgattggctgtggcccgccatctggttgctgccgaagcgtaacgcgtacggcacctggccggcttcgggcgagatggatctgatggaatcgcgcggcaacgagaatctgtacctggacggcgtgcagatcggcacgcgccaagtcggccaaacgctacactttgggccaaatccctcgtacaacgggtacccgacggcaacgctaacgaagaatgccctgccggagcaggagtttagcaagagctttagcacgttcgggttcgtgtggacgccggacaacatcacggtaagcatcaacggggaggatctggccacgatcgggggcgacttctggacgcgcggtggtttcgacaagcacaatctggagaacccgtggcgtcacggcacgcgcatggcaccgttcgatcaggagttccatttcatcattaatcttgcggtcggcggagttgcctttttccccgacgcggccacaaacccgggcggtaagccgtggaaaaacaactcaccccaagcggcgacagacttttggaacggacgcgcccagtggctgccgacgtggaacctggagcgggatgggggcaagtctgcctcgttgctggtggattatgtgaaagtttgggcgctgtaaaagttgctgtggcatttttcccccgcttttaactcgtgtggtggccagctacgcagtaaacaaaccactgaaagcgcattaatctgaagtttgattttttttaataaataaaaaaaaggtaaacaatcccattatcccacaaattgttctgaaacttctgcatgatgtttccatctctactgcgtatagtggttgagtcgcaaaaacaaaaaagcaacgctaaatgaacattaaatggcatgccaa

SEQ ID NO: 18 - DNA, 1219 bp, Anopheles gambiae
aagtcaccggtgtagttacccgtaaacaacattattaacaaactgttcgaaaatggtcctcctgggtggtgttgtgtttggcgtgttactaacgattgcactagcgaatccggataccggttgtgccaattccttgacgaccgctagcggcacgagagctaaacccggaccgtactgttcgtgggatcttatctttgaggacaattttaattcgcttgactttgagacctgggagcacgagaacactctcagcggtggaggtaactgggagttccagtggtatcaaaataatcgatcgaactcgtactgtgaaaatggtattttctacatacggccaacgcttctcgctgatgatacgggtgaggcgttcctgagcagcggtaccctcaacatccatggttccgagccagcaaaccagtgcaccagtgcaatgaattttggatgtgaacgtaccggcactgcgaccaacctgatcaaccccatcaagagtgctcgcgttcgcacggtgaactcgttcagcttcaggtatggaacgatggaggtgcgtgcccgcatgcctaccggtgactggctctggcctgccgtttggttgctgcccaagcgccaagtgtacggaacgtggcccgcttccggtgaaatcgatctgctagagtctcgcggcaatatggactaccgtggctcgaacggtgttcacatcggtacggaacagttcggatcaacgcttcacttcggaccgacccccacgctgaacggatgggaatcgaccgtcgcgtacaagaacactgccgcgggacagggttggaacacgggattccacaactatcagctcacatggacgcccgattacattcgattctcggttgacaaccaggtcgtcacacagatcgatgccggcactggtttctggaaccgtggaaactttggcaacattgcaccgggaacggagaacccttggattcacggaacgcgtatggctccgttcgatcaggagttctacatcatcatgaatctggccgtgggtggaacgaacggatacttcccggatgttccgccggcaagcaacggtaaccgtggtaagccgtggtcaaacaactcgccgactgctgcccgtgacttctggaacggacgtaactcgtggctgccgacgtggcgtatgaccgacagtcgtggcaaggactcttcgctacagattgactacgtgcgcgtgtgggctctctag

SEQ ID NO: 19 - DNA, 1176 bp, Anopheles gambiae
atgaagcgaattagcgttcctttggccaccctgctgctggtgggactggcagtcgcgttggaagagcagagcccgaagtgcacggtttctgtgacgactgctagcggtactaaggcccgtgctgggccgtactgcacgggagagctgatctttgaggataacttcaacacgctcgactttgagacctgggagcacgagaacactctcagcggtggaggtaactgggagttccagtggtaccttaatcaccgttcgaactcgtactgtgaaaatggtatcttctacatccgtccgaccctgcttgccgacgatacgggtgaggcgttcttgagcagcggtaccctgaacatccatggtggacagccggccgatcagtgcaccagcgctatgttctggggatgtgagcgtaccggttctccgaccaacctgatcaaccccatcaagagtgctcgcgttcgcactgtgaactcgttcaacttcaagtacggacggatggaggtacgtgcccgcatgcctaccggtgactggctctggcctgccgtttggttgctgcccaagcgccaagtgtacggaacgtggcccgcttccggtgagatcgatctgctagagtctcgcggcaatatggactaccgtggctcgaacggtgttcacatcggtacggaacagttcggatcaacgctgcacttcggaccgaacccctcgctgaacggatgggaatcgaccgtagcgtacaagaacactgctgctgggcagggttggaacacgggattccacaactatcagctcacctggacgcccgattacattcgattctcggttgacaaccaggtcgtcacccagatcgacgccggcactggtttctggaatcgtggaaactttggcaacattgcaccgggaacggagaacccttggattcacggaacgcgtatggctccgttcgatcaggagttctacatcatcatgaatctggccgtgggtggaacgaacggatacttcccggatgttccgccggcaaccaacggtaaccgtggtaagccgtggtcgaacaactcgccgactgctgcccgtgacttctggaacggacgtaactcgtggctgccgacgtggcgtatgaccgacaaccgtggcaaggactcttcgctccagattgactacgtgcgcgtgtgggctttgtaa

SEQ ID NO: 20 - DNA, 1556 bp, Anopheles gambiae
ttgtgacactgtgcgcgagtggcggagattacaagtcgacattctgtcgtattctgggtgaagctcatctagctagacacacgatgaggtggacctggggtttattgcttttctttgtggggcaaacagtggcctacaccatcccggcgttacgtttcgagtacccgacaatgcgtggattccgtgccagcatacccgatacccccggcttacagatgttcgcattccacgcgcgcctcaacaaacccttcgaccagttcgaggagggggattacaccgaggacgtaacggcaccggacggggatggacggtggacgttcgacacgaacaaacccgccctcccgaacggtaccatcatctactactgggtgtacgtgcagttcgccaacgagggctactggctgacggacaagaagcacaccgtaactcgtacgaaggctacagtagctccgaaaagtacgacgaccaccaccaccaccaccgtcaaacctacgacaacgacgcctcctccctgtccaccgacacttaccacattcaacgggggccagccgacctgtgccgggaagctgctcttcgaggacacgttcgagcagggttcgagcttcgcaccgaaatggcagcatgaagtccgcattccactggacactgattcggcggaattcgtgtcataccagagctcgccggaaaacagctacatcgcagcgggccgtctcgtcatcgtaccgacactcgtgacgcagaccgcggactacaccgatgagcgtatccgcacaggagagctgacactcgccggctgcacctcacccaccaacaatccgtacgaatgccaacggaaagcggcccgctcgacgattctaccgcccgtggtgtccgccaaattgaacacgaaacactttttccgcttccggtacgggcgggtcgagatacgggcgaagctgccgaagggagattggatttttccacagctttacctccagccgtacgaaaactactacggatatgcggactacgcctccggccagatgtggatagcgcacattctcgcgaaccgtatgctagcggccgccgacggtagacaaatcgatggccaccggctgcggggcggagtgctgatcaccaacaccggaccagtgcggtccgactttctgcgctccaacctgaacgaagagcactttggcgatcagttccacgtgtacgggttggtctggacgccggaacaaatactgctcaccgtggacgggttccagtacggtgcgctgcgcaccaatttccgccagcacgcccagcagcacaacctaacgcaggccaacctgtggagtgcggacgcaccgttggcaccgttcgatcgggagttttacgtatcgctcggtgtgggtgtgggtggggtgaaagattttcccgaccactcgctaaccggtccgtcgcggacggctaaaccgtggaacaacaccagcccgaaggcggaatacttcttctaccagaaccgcaacacgtggtaccgcacctggaccgaaccggagctgaccgtcgattacgtgcgtgtgtatgcgctgtag

SEQ ID NO: 21 - DNA, 1116 bp, Aedes aegypti
atgatacaaactcagaaaagagtcgttggaaccattgggttgctgttctgcgttgttggtttgatctcaggatgtaagcgctcaccgaccactgcttcaggattcagagctccgaaaggtcgcatatgttctggacagctaatttttcaagataatttcaaccgactggacagaaatgtttggcagcatgaaaattcgcttggtggtggtggtaacaacgagttccaatggtattctggatccggacgaaattcgtacataaaaaacaatcatctatacatccgcccaacattgacatcggatgaatatggtgaagcgtttctgaaaagcggagtaatcaatctcaacgagggtccccagagtcaaagatgcactgatgcaccgggttgggcagaacagatccacggatgctatcgacgaggaagtccagatcgtatcctgaacccagttcgaagtgcacgactccgaacggtgaattcattcgctttcaaatatggaaaggtggaaatcaatgctaagttgccacaaggagattggttgtggcctgctctgtggttgctcccaaaaggggatacctacggatattggcccaagtcaggtgaagtggatctgatggagtcacgtggcaatcgaaacctcgtacagaacaacgagaagatcggaatccagaaggtgtcatcgtgtctacatttcggagacaacccgaatgtgcgcagttcccagtgtggttctgttagtggtaatctttttggtgcaatgtttaacagataccaacttacttggacgaaaaatgtcattcaatttggaattaacgataggatatttcgtactgttaccccttatgagggtttctggagacttggcggattcagtttcaacccatggcctaagggatcgaagatggctccattcgacaaggagttttatatagtcatgaatgttgcagtcggtggagactactttccggataatgcgtggaatccacacccgaaaccctggagacaaggaaatccgagtgcgatgaccgacttctacaaagccaaatccaattggtacagtacttggggtgatgctgcggcattagaagttgactgggtgaaagtttgggctgcatag

SEQ ID NO: 22 - DNA, 1166 bp, Culex quinquefasciatus
gatgcagaacgattaccttatcacgctgctggtgctagctttgcttgcaagcatttgcctaggatgtcggcgctcttcaacgactgtttccggttcgaaagctccaaaaggacgcatttgtaaaaatcaattgatatttgaagataacttcaaccagttggacagatcggtttggaaccatgaaaattccgttgctggaggaggtaactgggaatttcaatggtactctggaagcgatcgcaactcttacgctaaggatggcaagttgttcataagacccacactaacggctgacgaatttggtgaagatttccttacaagtggctcaatcaatctgaaccaaggatcgccgagcgagcgatgcaccgacgatccagggtttgcgcaaacattttacggctgcgaacgaagcggcagttatgatcgcattctgaacccgatccggagtgcccgactccgtacaaaggacacctttgcgttcaagtatggaaagctggaaatccgcgccaagcttcccgccggagattggctgtggcctgccatgtggatgtttcctcagcaagactcgtacggtgtttggcccaagtcgggcgagatagaccttgtagaatcccgtggaaatcgggagttgtaccaggacggtaagcacatcggtgtgaagtggttgtcgtcctgtttgcactttggagagagctggaaccaaaagtcggagcagtgtggaacccacactcagggcggacttgctacgcagttcaacaattacgagatgatttggacgaaggacgtcatccagtttggaatcaatggaattgtttatcgaacagttactccgtacgagggattcgggaagctaggtggattcggatacaatccgtggccgcagggctccaaaatggcaccgtttgataaggagttcttcctggtggtgaatgtagccgtcgggggtaacttcttcccggataacgtgaggaatcctcaccggaaaccgtggtcccagggagctcccagtgcgatgaccgacttctacaaagcaaagtcggactggctcagcacttggaatggtgacgatgctgccttgcaggttgattacgtgaaagtttgggctgtataggtcaaatgtggcatcaagaaacaattcgaaggctgtcatttgtttttaaacttaa

SEQ ID NO: 23 - DNA, 1765 bp, Aedes aegypti
atgaagtgtagtttaatcatattgtttatagcaatccaggccggtgtaagtaatcagtttaagtgtggcgttccacagcaaaggacaatccacttgatagtgaacggattcaacgcactgaaaggacgatggccgtggcacgtcgcaatctatcacaagaaccatcccctgacagcttacgtttgtggtggaactctgatctcgtcgacgcacgccctaacggctgcgcattgtgtcatcaatccacgcaccggctatcaaataccaagtaaaagcattttgatggaagccggtgcgtacgatttgaaccacgacttccaaggaaggcaacgacactcggtcaaagctgtttataagatggcaaactacaccaggacaagtcccaaatatgatgtggccatcctggagctagattcggaagtcgagttcaaccagtatgtccaaccggcttgtgtgtactcgagaaaggatttaactggaaaggtgggaaccgtcgttggatggggcataactgagacaaacgaagtttccagtgttctgaaggaagcggaacttccggtagttgatacgcttacttgtctaacaagcaatcggtatgtgtttggaccaactttggacaagggcatgttttgtgcgggttacgtagatggaaccagcgtttgcaacggcgacagtggaggtggaatattcttcaacataaacggagcctggcacgttggaggtattgtgtcgtacaaacaggttagagaagggaatactgcattgtgccgaactgatggatacgctgtttttacgaaactttacgattacttaccatggattagcacagtaactggggtcaatctgatgggtgtaaagggaagaaaaatgccggacggcgataagtgcgaaccaaagagcgccaacgcacccaaaataggcacgaatgcatttcctcgaaattgtggcatctatactccaagtagaataattttcggccggactgcaaaagtgtttgaatttccgtggatggcaatacttctgtacaagaacaaaaaccttcattgcgtgggtactctcatcaataagcgctacgtgttaacatcggcgatttgtgttcagccaagttttcccgaaaaagtgcgattgggcgaacacacccgacagcaaaatgtggactgtaacgaagatgatgattgtgctcctcctgtgcgagattaccaagttgaatgcgttgtacgacatcagaactacaaccataaaactgaactgtacaacattgcgctcattagactgaagagaaatgtactatttgaggatcacatccaaccgatttgccttcccctaactaaaaatctaagatcggccgaggtgggaagctacatcattaccgggtgggggacaacggaagagaacaaactatccctatcgctcaaaaaggcaaccattctggcggtgagtggtcacgataaatgtcgccgactgtttgccggagagcagtatgaccccaaagcaatctacaccgatcagttctgtacggtatcggaggattcgccggcttactgttacggagatggcggaggaccgctgggtcaaacggtgcggttcaacggaatgcgtttcgtacagtttggaatcttttcgaacggatggggtgaatgccatcggtcaaatattctttttacaagagtgggcgcctatatggattggattttggccaacgtaagagcgtagcagtggatgaaatattcgggtgtgtacatcttctatgaacgattgcaacatc

SEQ ID NO: 24 - DNA, 970 bp, Aedes aegypti
aatattgacaaacccagtcgctcctagtcctaaacttgcaaaatacataacacgggcagcttgcgcacttcccggcgtcgaacgcagcatctgctgcgaaccacaggaagtgtctccatgttctactgccgagcaaaacctcttatctcaggattgcggaaagaccgtttttgatagggtagcgcacggaaacgtcacgctcgtatttacctatccttggatggccattgtgcggtacaatgaaagcggcagaattatcgatgggtgcggagggtctttgataaacgaacgatatgttttaacggccgctcactgcatcaaaccgaggagcactcggaagctgcacagcgttattttaggagaacataccaaaggacaggaagtagattgcgaggtatactatcttggagatacggtggacagagattgtgctgacacggttgaagaatactctattgaatcgtccgagtttcatagcgactacaatcgacccaagtacaacaatgacataggactgattcgtttagatagaaatgtaatcatgaaagatcacattcaacccatctgcttaccggtcacggccgacctccaaaagcaaatcttcgacaagtacattcttactggttggggaactacggaaaatggaaccgcatcaaatatactgctcaaagcattcttaccccgcgtagataacagagattgtcaacagatattgacacggaagcggttgaatattcagcttggcagtaaacagatgtgtgccggaggcaaagatttggtggacgcgtgcaaaggtgactccggtggacccctagggacatttgccaaccaccaaggaactaggttcgtgcaatacggcattgtcaccatcgggataggttcatgcgggcaaaatagcgttcctggcgtgtacagccgagtagctgattacatggactggatactgaagaagatgcagcccaattgttaa

SEQ ID NO: 25 - DNA, 1422 bp, Aedes aegypti
agttcttcgcgtagaattcgagcgatcggacgcattgcagtgcgtactccgaggtggtacaaccaaaaagctgcacagaaacctgaaataattcacatcttccgataagaagtcgcccatccttggggttcaacagcaagccgaaatggaggctggaccacttactcgagtgttgatctgttctttagtgattctgagctcgtgccatggtgcggtgaaagcacaaagcgtaccatgttccacaccaaccaatcaagcgggcacgtgtgtggcaattgagcggtgtcggaatatctacaacattgtgaacaacccaacgccacctccggtcggtattgccaattacatcaaaagggctgcctgtactctaccgagcgtgccgcgcagtgtttgctgtcaaccggcagaggttgtccccgaaccgacgacacattcgccccccgtcacagcatcctcatggacgcatcccaaactgaatcttctgcccagggactgcggccaaacggtctccgacaggctagcctacggcaatgtaaccaaggtattcgagttcccctggatggccgtgctgcggtacgactataatggcgccatcaccgacggatgcggcggagcgataatcaacaagcggtacatcctgaccgcagcgcattgtgtcaaaaccagaagcactatgccattacatagcgttgtactgggggagcacaccaagaatcaagaaatggattgcaacatctacaacgataagtttggcaaagaaatagaacgagactgcgctgatccgattgaggtgttcggaattgacaagttcatagtgcacccggactacaatcgtcccaaatacagcaacgatattgcattggtccggcttaatagagatgtcgttatgaaagatcacattcgccccatctgtttgccagtgacatccgcccttcagaggcaaacgttcgacaagtacatcgttaccggatggggaactacggaagaaaaagtggggtcaaatattttgctgcaggccaatataccgcatgtgagcattgccgactgtcagcgaaaaatgaacgaaaaccgtctgaacatccagctgagcgaaaagcagctttgcgcaggtggagtgaacaaggtggacacgtgcaagggtgattctggtggaccgttagggttcagcgccacccacaatggtgcccggttcatgcagtttggcatcgtttcgctcggagttgattcctgcggggagaagagcgtaccgggaatctactgtcgagtgtccgcctatatggattggatattgaacaacatggaagcatagccgcgtagagacaatgaatatgaagcaccgtgtgcatgtgttcccataagacttgcgttagtgtgataggagttgcaattttggatgaaaccaaatatattttatgaaacttg

SEQ ID NO: 26 - DNA, 1187 bp, Aedes aegypti
atggcatcacgcttactgataatagtgtccctagtgctttatgcgtcgtccgccgaaataaacgcacaaaatccagcctgtaccacaccgaacggcatcccgggtcagtgcatatcggcatacctatgtcgggaaattatgatgttcatcgtcgaaaagccgatacctgtgcatcggcagcagtacctaaagcaatccgcttgcaaaaggccagacgtgaaattccccgtttgctgccagctgaaggaaattatatcggccgaatccttgctgcctacggaatgtggtgttgcgacaagcgatcggattgcttacggccttgctgccgccatattcgagttcccatggatggctttgctccgatatcgtgaatttaacggcgacatcgtcgacggatgtggcggatcgttgatcaacgaacgctatgtcctgacggcggcccactgcttgaaggtgaaaactaaaactttagatcacgttcgattgggtgaactcaacaaaaataccattatcgattgcgaagtaaatgacgacgaatgtgccggaccagtgcaggatatcaaggtggaaagaagtatcatccatccccagtacaatatgccgaagttttccaacgacattgggttgattcgtttgcgccaatcggtcgtttttcaggagcacatcaaaccgatctgccttccggtgacgcataagctgcagaaaacgctctacccccgatacatcctcaccggttggggtaaaacggaaaaggacgaactgtcggacattctgcaaaaggctgttcttccccgaatcgacaacgaacagtgcatgcaagttctgaaacagaaccagctgcgcattgccctgacggataagcagatgtgcgccggtggtgaaaaacgtgtcgacagctgccggggagattccggtggaccactggcatgggttgacaagttgaacgacgcaccacgcttcattcaattcggaatagtttccctgggaagcaacacctgtggagagaaaagcgtgcccagcatctacacccgggtgggacagtacatggactggatcctgaacaatttgcacccatcatgagaattactctcatctaataactatcaacctgtacagggatttctcattgccaaaaactcatgtagattaagcttgaaaataaatattatttatgaaatacataattt

SEQ ID NO: 27 - DNA, 2083 bp, Aedes aegypti
atgatcaatccagcaaggtttgatttggtgttgattgtattaggatgtttgccgcttctgcgtttaaatcaggcaacttttttcgacacgccaggggtctactgtggcgttcagccaataggacctgaggaacttgccgaaaaggagatcgatgcacttccaggggagtggccatggcatgcagcaatctatcagatccgacgcgaaggtgccgtttatgtgtgtggtgggacaatgatcgatgaacgcttcgtcgtaaccgcagcgcaatgtgtttgtgatcgagccagtgcagcgaccctgaacaacgaaacgatcttggtgcgaatgggggttttgaacctgggtgctccattccagttgatgtcgcagcaatattcggtggcggatgtatttatccacccgaatttcactgttgatgacttcagggcagacattgctgtgttgaagttgaccatggtggtgcgttttagtgattatatccacccggtttgcgttgaccagaaaggtgacttgcatgtggcgcgtggaactattgtcggttggggctcgactaatgtgataagtgatctcagtgatgtgcaacttcccttgtacagtggtgtcatttgtggtactgcgcaagaagaaagtaccttttgcgcaggatatgcgaactttactagtgtatgctacggagacataggcggtgggatattcaccaagatcgcacatgcctggcaccttctaggaatactttcgatggataaaaacaaatcggttgataatgaaaactgtcatattgatggttttgctaccttcaccaaagtttataattttctaccatggatcgagaaagtaacaaaactagagctgctggagacttcagatgagcacaagttcgtaatacccactggagttcccgccaaaaaatgtgctctcacagatcctcaaaattcaacctcaaattccagccatcttccgcaggattgtggccgctacgtgatcaatcgtatcctgcatggccaacggacggagttgtttgaatttccctggatggctatagtgcgatatttagtggctcccatacacgagttggaaaatctttgcacgggaagcttgataagcaatcgctatgtgctaacagcagctcactgtgtgagggcgagcaaaaaaccataccaggtgagattgggtgaacataccataggccaggaaagggactgccatcggaatgatgatcaagagtgtgctccacccgtgcgagattacgatatcgaatgcatcgctcagcaccggggatacaacagacgattacagcaggataacattgccctgattcggctagatcaggatgtcacattcgaagatcatatccaaccaatatgtctacctacgtcgtcatacctgaaaacactacaaattcctcagtacatcgtaaccggatggggagatacggaaaccggccacaaatcgatgactcttcttaagaccacggttaagcaagccaatcgctccgaatgccaggagtggatgaccgtacggggtctgaagctgaccgaggatcagttatgcgtaggggagagagacggagcggataactgcaaaggtgatgggggtgccccccttgggtatagtgccgagtacaaccgtggcatgcgcttcgtacagttcggaatagtgtcctttgggtccggatgcggagtcgtgccctcggtgtacactagagttgctagctatatggattggataacggcaactatatccagcctggattcggattagtgggcaatcagctcttgtaggaagatttagaattgttccatgagcaatatttaaatattagttgatattcagttggttgtcgactatcttagtcttaatttattaaccttcaagtgattggaactccattgcattccccaataaatatatgtattaggtacaagaattgtaagataggatttataattgcattggctataacattagtacattggtataatgtactaatggtacaacattagtcataggactcaggatgtgactattaaatacaataaatacaatgtctaaacttcaataaagctacagtaattcaccc

SEQ ID NO: 28 - DNA, 1076 bp, Aedes aegypti
agttcagttgataaagttgcatcgttcggatgtgtctatcgctagatgtcctataataagatgttcgaacagacgactttctcggtgtggtttgctctcagtttggtgctgtggttggggatcagagccgatgctgacgggctggcatccgataaattgaaactacttccccgatattgtggactcagcatttccgacaggcttgtcggaggaaagtatgcgcagttgtttgaatatccctggatcgctctgctgcagtatgatcacgatggggaaatagagcatggttgcagtggaacgttgatcaacaatcgctatgtattgaccgccgcgcaatgtctggccaatagaaccgattttcaattgcttaacgtgcgcttgggtgaactggacaaaagtcagtatttagactgttctgtgtatgaaacgggagatgaggctgaaaaagattgtgcagatccagcggatgattatggcgttgaatcgattcgcatccatcctgattacaaccacgaaacatttcagaacgacatcggactgattcgcctaaatcgagacgtcgtaatgcatgataacacaaatccaatctgcatgccgattgcaacttcggtacggtcggcgacaacttcgaaactcgtcggtatcggctggggaacttgcggaactcaacagagctcaaatctattgcagaagtcgttgctgactccagttgatagcgtggaatgcaatcgtgcactatctgccgggcaaattgagatgcaagtaagcgccgctcaaatctgtgccaccagattcaccggtatggacattggaggaccaattggagcagtgatgccccactcccacgccggaccgaaattcgtccaggtgggcattgcttccggagcagtgggttactgtgaacgggaaaatgttcccggggtttacgttcgggttgcaaactatatggattggattctggatactattcatgcgtaggattcacataacattcatattataaatataaatataaagttaaattctgtagaacgaaagttatagacacttaagaaatatacaattgaaatgaggat

SEQ ID NO: 29 - DNA, 687 bp, Aedes aegypti
ctcgttatcggaatagtgcttgggtgcttgcgactgatcttgaacaagcaaggcacagcgaaagtagggtgacttgttgtattttcgacagaaaatccatcctgtaccacaccgaacggcatcccgggtcagtgcatatcggcatacctatgtcgggaaattatgatgttcatcgtcgaaaagccgatacctgtgcatcggcagcagtaccttaagcaatccgcttgcaaaaggccagacgtgaaattccccgtttgctgccagctgaaggaaattatatcggccgaatccttgctgcctacggaatgtggtgttgcgacaagcgatcggattgcttacggccttgctgccgccatattcgagttcccttggatggctttgctccgatatcgtgaatttaacggcgacatcgtcgacggatgtggcggatcgttgatcaacgaacgctatgtcctgacggcggctcactgcttgaaggtgaaaactaaaactttagatcacgttcgattgggtgaactcaacaaaaataccattatcgattgcgaagtcaatgacgacgaatgtgccggaccagtgcaggatatcaaggtggaaagaagtatcatccatccccagtacaatatgccgaagttttccaacgacattgggttgattcgtttgcgccaatcggtcgtttttcagggctga

SEQ ID NO: 30 - DNA, 1886 bp, Aedes aegypti
gtcaaacaataaggaggtgataaggcttattctgtgaagttgatatttattagtgtaattttaaacctttgttagtacgattaccattaaatcccatattataatcgaaatgaagtgtagttcaatcatattgttgatagcaatccaggccggtataagtaatcagtttaagtgtggcgttccacagcaaagcacaatccacttgatagtgaacggattcaacgcactgaaaggacgatggccgtggcacgtcgcaatctaccacaagaaccatcccctgacagcttacgtgtgtggtggaactctgatctcgtcgacgcacatcctaacggctgcgcattgtgtcatcaatccacgcaccggctatcaaataccaagtaaaagcattttgatggaagccggtgcgtacgatttgaaccaagacttccaaggtcggcagcgacactcggtcaaagctgtttataagatggcaaactacaccaggacaagtcccaaatatgatgtggccatcctagagctagattcggaagttgagttcaaccagtatgtccaaccggcttgtgtgtactcgagaaaggatttgactggaaaggtgggaaccgtcgttggatggggcataactgagacaaacgaagtttccagtgtcctgaaggaagcggaacttccggtagttgatacgcttacttgtctaacaagcaatcggtatgtttttggaccaactttggaaaagggcatgttttgtgcgggttacgtagatggaaccagcgtttgcaacggcgacagtggaggtggaatattcttcaacataaacggagcctggcacgttggaggtattgtgtcgtacaaacaagttagagaagggaatactgcattgtgccgaactgatggatacgctgtttttacgaaactttacgattacttgcaatggataagcacagtaactggagtcaatctgataggtgtaaaaggaagaaaaatgccggacggcgataagtgcgaaccaaagagcgccaacgcacccaaaataggcacgaatgcatttcctcgaaattgtggcatctattctccaagtagaataattttcggccggactgcaaaagtgtttgaatttccgtggatggcaatacttctatacaagaacaaaaaccttcattgcgtgggtactctcatcaataagcgctacgtgttaacatcggcgctttgtgttcagccaagttttcccgaaaaagtgcgattgggggaacacacccgacaacaaaatgtggactgtaacgaagatgatgattgtgctcctcctgtgcgagattaccaagttgaatgcgttgtacgacatcagaactacaaccataaaactgaactgtacaacattgcgctcattagactgaagagaaatgtactatttgaggatcacatccaaccgatttgccttcccctaactaaaaatctaagatcggccgaggtgggaagctacatcattaccgggtgggggacaacggaagagaacaaactatccctatcgctcaaaaaggcaaccattctggcggtgagtggtcacgataaatgtcgccgactgtttgccggagagcagtatgaccccaaagcaatctacaccgatcagttctgtacggtatcggaggattcgccggcttactgttacggagatggcggaggaccgctgggtcaaacggtgcggttcaacggaatgcgtttcgtacagtttggaatcttctcgaacggatggggtgaatgccatcggtcgaatattctttttacaagagtgggcgcctatatggattggattttggccaatgtaagagcgtagcagtggatgaaatattcgggtgtgtacatcttctataaacgattgcaatatcctttaaaatttt

SEQ ID NO: 31 - DNA, 1314 bp, Aedes aegypti
gcttctttcactggtttagaagcaactctgtggtcgttggtggttgaaaatttaatcttggatttgtgattcctgtctacagcctgctgcactcgaacgcgatgataggattatcattattattcggctccctatggactatcattattctgctgactgggatacaaagccaaaatgttccttgtacaacacctgcccgtaaatctggcctttgcgttcctattcagcgatgtctcaatatccacagaatattgaccaatccagtcgcccctagtcctaaacttgcaaaatacataacacgggcagcttgcgcacttcccggcgtcgaacgcagcatctgctgcgaaccacaggaagtgtctccatgttctactgccgagcaaaacctcttatcccaggattgcggaaagaccgtttttgatagggtagcgcacggaaacgtcacgctcgtatttacctatccttggatggccgttgtgcggtacaatgaaagcggcagaattatcgatgggtgcggagggtctttgataaacgaacgatacgttttaaccgctgctcactgcatcaaaccgaggagcactcggaagctgcacagcgttattttaggagaacataccaaaggacaggaagtagattgcgaggtatactatcttggagatacggtggacagagattgtgcagacacggttgaagaatactctattgaatcgtccgagtttcatagcgactacaatcgacccaagtacaacaatgacataggactaattcgtttagatagaaatgtaatcatgaaagatcacattcaacccatctgcttaccggtcacggccgacctccaaaagcaaatcttcgataagtacattcttactggttggggaactacggaaaatggaaccgcatcaaatatactgctcaaagcattcttaccccgcgtagataacagagattgtcaacagatattgacacggaagcggttgaatattcagcttggcagtaaacagatgtgtgccggaggcaaagatttggtggacgcgtgcaaaggtgactccggtggacccctagggacatttgccaaccaccaaggaactaggttcgtgcaatacggcattgtcaccaccgggataggttcatgcgggcaaaatagcgttcctggcgtgtacagccgagtagctgattacatggactggatactggagaagatgcagcccaattgttaagtgtgatgttttgaatagttttaatgggataaggataaatcaatttaataaaaaatactcgataaatggattttcgaaattgacttttatcagaata

SEQ ID NO: 32 - DNA, 1122 bp, Culex quinquefasciatus
atgcagttgatagtggtacttggacttgcgttgagttggggtagttggtgctttttgcaaggagctgaagcgcaaaacccctcctgcaccaccccggccatgcagccgggaatgtgcgtcccggtggagggatgccgcaatatctacaagattttccagctgacaaacaacaagatcccgccgaagattttgacctacatccggcagtcggtgtgccggttggcgggcgtcaccaaggccgtttgctgccagctgagtgaaatcgacaagtcggtgctggtggacaagcagggttcgaaaaagccgtccctgcttccggttgagtgtggcatcataacgacggaccggatttccaacggacaagccactgctccgtttgagtttccgtggatggcactgctgaggtacaaggatctcagcgggacgattacggacggctgcggtgggtcgttgataaacgagagatacgttttgacggcggcacactgcctgggagttaggagatttgcactggatcacgttcgcttgggagagcacaccaaaagcaaggagcaggattgtattggctcggaggacgactgcgcaggaccggttcaggatatcgcagttgagttggagattgttcaccccgagtacaacaagccaaagtatgcgaacgacattggattgattcgattagttcgaaatgtgatgtttgaagatcacatcaagccaatctgccttccggtgacggaggactaccagaacatgctgcatcccaagtacatcataactggttggggaacgacggaaaagaacgatctttcggacgtccttctgaaggccaccctgccccgagtggacaattccgaatgccagcaggtgatggctagcaatcgtttaactgtgctgctctcggataagcaaatctgcgccggaggaaaggatctggtggacagctgccggggcgattccgggggaccactgggaacggtgggaatgcttaacggggacgctagattcattcagtttggaattgtttccgccggtttgaacacgtgtggggagaggaacgttcccggaatttttacgagggtcggaaagtacatgtcgtggatcgaggacaatctcaagccgtcctga

SEQ ID NO: 33 - DNA, 1086 bp, Culex quinquefasciatus
atgctgttcaaactgctcgcaacctccgtcgccctgatggcgtccatccctcacggattgacgcaaagcttgaacgaaccgtgcaccaatcctcacggccaacccggccgctgcgtattccttcgggagtgccaaccgctgctggacatctaccggcgagacaacgtttcgtacggcgagagtgagttcttctacggcagtcgctgttccggccagttcgaggggaaaccgctgctgtgctgcttcccggcaccggcaaactcctccgccagcctgccgcgagccccgtccgactgtgggctggccccgccggaacggatcgtcggtggccacgaaaccaccctcggtgagttcccctggatggcgctgctaatgtaccgcggcccgagacgcgagcttcagctgagttgtgccgccacgctgatcaactcgcggtacctcgtcacggccgcccactgcatcaagcaggtcccggccgaattgacgctcagtggagttcgtctcggcgagcatgacatcaccaacgacgaggaacgagactgcgatcagcacggctgtgcggatgttccggtagaggttggcattgagaaggtgatcgtgcacgagcagtacaacgcgacggaacgcggtcagtacaacgatatcgcgctgatccggctggatcgggacgtgggcttctcggactacatcgatccggtttgtttgcccgttgaggacagtgtgcggaagatggaccatacggggctgaaggccgtcgcggccggatggggcattacggaaacaggtgaaggaagcgacgtcaagctaaaagtaaccctggacgtgctcgaccacaagaaatgcgtcgacgtgtacagatcgtcgcgagtggcgctacgcgacacccagctgtgtgccggcggaaaggagggcaaggacacctgcaggggcgattccggcggcccgctgatgcgttccgtggacgggaattactacctgatcggggtcatcagctggggagcgacccagtgcggaaccaagggcatcccggcgctctacacgaacgtggccatgtttgtcgactggatcgagaatcacttggagtaa

SEQ ID NO: 34 - DNA, 1707 bp, Culex quinquefasciatus
atgtcatttctgcgggtctgcgcaataatctgcgcgattctcgccgactttgccgaaccgttcgagtgcggcatccggaaggttagaaccaccgaggtgattgtgaacgggcacgaaagttcgccgggaaaatggccctggcacgcggccatctactaccgggaggaccgtagaacaagcaagtacgtctgcggaggcacactgatcagccggaactttgtcctgacggcaaagcactgcgttgtgggttcgaatgggaacgtgcttgcgaggcgaagtttgctgatctggctgggaatgcacagcttggacgttatgaacccgcggatcatgcagcaaaacgacgtgcgtaagatccactgcgttgggaacgatggctcggggaagaagaacgacgtcgcgctgctggagttgatgacggaggtccgcctgacgagctacatccaaccggcttgcgtgaatcaggtcgtggatttggccgataaggtgggaaccgtcgtcgggtggggtgtcactgagcacgatgagctttcgcctgtgctgaaggagtcgcaaatgccggtcattgatacgagaatctgcatcgaaagcaatcgggctgtgtttggacaggctttggatagcagcgttttctgtgcagggttcaccaacggaacaacggtctgcaacggcgacagcggaggtggattgttcttccagagaaacgacgtttggtacgtgggtgggatcgtttcgtttacggagcaacggaaaggaagccagctctgtcaaaccacaggctatgctggattcaccgatttgagtgggcttctatcgtggataaagaatgttacggagttgggctacctgctggagcaggacgaggatcgagttggtagaggttctgaagaagatgatgatgatccaacaactacggcaattaatctactgccaaagcagtgcggtatttatactgtgaacagaatagtgggaggtcaaaatgcgaacctctacgagtttccctggatggccattctactttacaacgatgacgtttttcgagccacgggatcgctcattagcaagcgttacgttctgacgattgcactgtgcaaatatcccaataaacctgttcaagtcaggctgggggaccacgtgcgagaccaatacaaggattgcagccccaacgacgctaccttttgtactcctcctgtccgtgattacgacattgaaaagtgtgaacagcacataaccttcaaaagtagaaacacaactgcaatgtacgacatcgggttgctacgattgaatagagatgtggtctttgaagaccacattcaaccgatctgccttccggttacggacgccttaaggcaactgaagctgtcgagctacatcatcgccggctggggcagcacaagagctgaaaacgcgaccatggttctgaaaaaggcaaccgtcccggtggccaactgttccatctaccgagacaaactggaagtgctcggattcaccaacaacgacgcgtttctgtgcgccggcggtaagggaacggccacctgcttgagggacaccggaggaccgctgggaaacctagttcagcacaacggaatgcgcttcgtgcagttcgggattgcgacattttcgtccaaaaactgcggccttcttccctccgggtacatcagtgtgtctcaccacatggactggattctggcgatcgtggagccttga

SEQ ID NO: 35 - DNA, 1080 bp, Culex quinquefasciatus
atgctccgatctaaaagtattttgccatatttagttctgtcgtgtttaatcctgcacgtgaagggtttaaatctaaacgatcgatgctccagccccaacggtgtctccgggcggtgtgtccacctgagagggtgtccaccgctgagggatatttacaccaaaccggtagttacgtaccaggaaagttcattcctatcggacagtcgctgcggaatggacggtagaattccgttggtttgttgcgtttcacccgacttggacacttcaacgagtgcacctgctggtgaaacttgcggcgtcgattactcggaacggatctggggaggcaacgagacggatttggatgagtttccttggacagctttgatccggtatcggagggcgaatggcgtcctaaccttcaattgtggtggatctctaatcaattcccggtacgttatcaccgcggctcattgctttaacgagagggcaggattccaagttgctggggttcgacttggagagcatacaattagcaatgagggaaaagactgcaaagagaccgaatgtgcggatgtacccgttgatcgaaacattgagaagattacagttcacgaagattacgatgccaattcgaaaaaccaattgaatgacattgccttggttcggatggaccgggacgttccatcgtcccactacatccaaccaatctgtctaccaacgcaggaatcactgaattctagaaatatcattgggcatcgattgaccgctgccggctggggacgaacggaaactggtgatccgagcgacaccaagctaaaggtggttcttgaaataaccgaaccaaacgactgcagtacggtgtacaaaccagctggaattgtaatcagtgacaggcaactttgcgccggtggtgagaaaggcaaagatacctgcactggggactcgggtggaccgttgatgcaacgagtcgggacccggtgggtcctgtacggcattgtcagcttcgggccgaaactgtgtgccaggaagggtattcccggagtgtacaccaatgtggccaagtacattgattggattgagagcaacatggaagtgtag

SEQ ID NO: 36 - DNA, 1095 bp, Culex quinquefasciatus
atgttgttcaaaactgtacggtttgccaccttagtcctggcggtaacctttgtcatattggggcttatcccatatggactgtcacaggctctgaacaaaccctgcaccaaccctcgcggcgaaccaggcctctgcgtgttccttcgggagtgccgcccgttgctggatattttcaacacaccggacgtgtcggcacgtgaaagtaagtttttctacgccagtcgctgttcagggaattccagccgcaaaccactggtctgctgtgctgcggcgccttctgcgacctcgaaagagcttccgcgaccgccggccgactgtggactagactcgcccgatcgtattgttggcggcacggaaaccacccttggcgagttcagttgggcggccctgctcgtctacaaagaccggaatggcaaagaagactacaaatgtggtgccacgctcatcaactcccggtacgtggtaacggccgctcactgcatcacaatgctttccggaggttggacactcaacggagttcgcctcggagagcacaacgtcaccaacaaagaccaagattgcgatgagtacagctgtgcggatgtcccggtggaggtcggcgttgagaaagtgattctgcatgaggagtataaccaacataaaaggaataacgatatcgcgctgatccggctgaatcgggacgttggcttctcgacctacatcaatccgatttgtttgcccctcgaggacagtgtgcggcagatggaccatacagcagtgaaggccaccgcagccggatggggaataacggaatctgatcgagcaagtgaagtcaagctcaaagtgacactcgacgtcgtggatcttcaaacgtgtcgcaaaacaaacataaagttcaacaagttaggcaacacgcaactttgtgccggcggaaaggaaggcgaggacacttgccggggtgattctggcggaccgttgatgcgtcaaatccaggggaactaccacctaattggagtcgtcagtatgggaccgataaagtgtggaaccgaaaatgtacctggcgtttacacaaacgtggccacgtttatcgactggatccagagcaagttggagtga

SEQ ID NO: 37 - DNA, 1095 bp, Culex quinquefasciatus
atgttgttcaaaactgtacggtttgccaccttggtcctggcggtaacctttgtcctgttggggtttatcccatatggactctcacaggctctgaacaaaccctgcacaaacccccgcggcgaaccaggcctgtgcgtattccttcgggagtgccgcccgttgctggatattttcaacacaccggacgtgtcggcacgtgaaagtgagtttttctacgccagtcgctgttcagggaatcccggtcgcaaaccgctggtctgctgtgctgcagcgccttctgcgacctcgaaagagcttccgcgaccgccggccgactgtggactagactcgcccgatcgtattgttggtggcacggaaaccacccttggcgagttcagttgggcggccctgctcgtctacaaagaccggaatggcaaagaagactacaaatgtggtgccacgctcatcaactcccggtacgtggtaacggccgctcactgcatcacaatgctttccggaggttggacactcaacggagttcgcctcggagagcacaacgtcaccaacaaagaccaggattgcgatgagtacagctgtgcggatgccccggtggaggtcggcgttgagaaagtgattttgcatgaggggtataaccaacataaaaggaataacgatatcgcgctgatccggctggatcgggacgttggcttctcgacctacatcaatccgatttgtttgcccctcgaggacagtgtgcggcagatggaccatacaggagtgaaggccaccgcagccggatggggaataacggaatctgatcgagcaagtgaagtcaagctcaaagtgacactcgacgtcgtggatcttcaaacgtgtcgcaaaacaaacataaagtacaacaagttagacagcacgcaactttgtgccggcggacaggaaggcgaggacacttgccggggtgattccggcggaccgttgatgcgtcaaatccaggggaactaccacctgattggagtcgtcagtattggaccgataaagtgtggaaccgaaaatgtgccaggcgtttacacaaacgtggccacgtttatcgactggatccagagcaagttggagtga

SEQ ID NO: 38 - DNA, 1086 bp, Culex quinquefasciatus
atgctgttcaaactgcttgccaccaccgtcgtcctgctggcgtccattcctcacggattaacgcaaagcttgaacgaaccgtgcaccaatccgcacggccaacccggccgctgcgtattccttcgggagtgccaaccgctgctggacatctaccggcgagacaacgtttcgtacgacgaaagtgagttcttctacggcagtcgctgctccgggcagttcgaggggaaaccgctgctgtgctgcttcccggcaccggccaactcctccgcaagcctgccgcgagccccgtccgactgtgggctggcaccgccggaacggatcgtcggcggccacgaaaccaccctcggtgagttcccctggatggcgctgctaatgtaccgcggcccgcgccgcgagcttcagctgagttgtgccgccacgctgatcaactcgcggtacctcgtcacggccgcccactgcatcaagcaggtcccggccgaattgacgctcagtggagttcgtctcggcgagcatgacatcaccaacaaagaggaacgggactgcgaccaacagggctgtgcggatgttccggtggaggtcggcatcgagaaggtgatcgtgcacgagcagtacaacgcgacggagcgcggtcagtacaacgatatcgcgctgatccggctggatcgggacgtgggcttctcggactacatcgatccggtttgtttgcccgttgaggacagcgtgcggaagatggaacatacggggatgaaggctgtcgcggccggatggggctacacggaaacagatcaacggagcaacgtcaagctgaaagtaaccctggacgtgctcgaccacaagaaatgcgtcgacgtgtacagatcgtcgcgagtggcgctacgcgacacccagctgtgtgccggcggaaaggagggcaaggacacatgccggggtgattccggcggcccgctgatgcgttccgtggacgggaattactacctgattggggtcatcagctggggagcggcccagtgcggaaccaagggcatcccggcgctctacacgaacgtggccatgtttgtcgactggatcgagaaccacttggagtaa

SEQ ID NO: 39 - DNA, 1225 bp, Culex quinquefasciatus
atgaaagtggacatcctgctgctggcctgcgtggccctcggagtttcgattccgggcagttctgcacaaagcgcaccatgcaccacccccagccggcagcctggcatgtgcgtccgggtcgagcgttgcaaaaacatctacagcatcatcacgagcccaacgccgatgccccagtatgacaactacatcaaacgggccgcgtgtacccttccgggggtgccccgaagcatttgctgccagccgaccgaggtcggtccggaaccgacgaccacgacgctggccccgttgtccgggaacgtgaacctgctgccgacggactgtggccaatcggtgagcgatcggatcgccggtggtaacgtgaccaaggtctttgactacccgtggatggccctgctgcggtacgaaacgaacggagcgttcattgacggctgtggcggatcgatcatccacaagcgttacgtgttgacggcggcccactgcctcaagaccaggagcacgctcagaattgatcacgtaattttgggagaacacaccagaagcagcgaaaccgattgcaacatctaccggggcgccgacggagaggaaatcgagcgggattgtgccgacccggccgagcagtacaaggtggagtcgttcgagattcatccggactacaatcggccaaagttcgccaacgacattgggctgattcggttggagcgtgccatcacgtggaaataccacatccggccgatctgcctcccggtgactgcggacctccggtcgaaacagttcgatcgttacgtcgtgaccggctggggcacgactgaaaaccaaaccggatcggacgtgctgctggaggcgattctgccccgcgtcagcaacgccgactgccagcagaaaatgaccgagaaccggctgaatgtggcgctcagtgacaagcagatgtgcgccggaggagagaagctggtggacacgtgccggggtgattccggaggtccgcttgggttcagcaccaactacaacggggcgcggttcgtgcagtttggcattgtttcggccggggtgaacacgtgcggacagaagagcgtgcccggaatctactgccgggtggccagctacatggactggatcttgcagaatattagagcttgagatgcgtggacttgagtgtgaacgagagttttttgatatgtgacatagaaaatatatttttaattaccaaataaataatgctcacctgatt

SEQ ID NO: 40 - DNA, 912 bp, Anopheles gambiae
atgcacaagcaagcgcgcagcaatccaaacccgcacaatctcgtgttcgatttttcaagcaaaacgaatcaagagtccgttaattttaaacgttttaaggtccctaaactactacagttccaagaccggtgtaggaacattgtgccagcagcggacagcaacaaccatcgtaagcgcaacctgacgctgctcgatctagaaaagtgcggtccgtacatcgaggaaaagattgccaacggcatagacgccatactgttccagtatccctggatggcactgctgcaagacacggaacttgcattcgtttgtggcggtacaatctcggtacgtttgggcgagttcgatctgaagagcgacatcgactgtgacaagcgaggggagcggtgcgctttgccaccccaggacattgccgtggagcgaacgatcaaacacaaagactacagtgcgcggcataaggtgaacgatattgcgctcattcgacttgcatcggaggcgtcctataacgaaaatgtgatgccgatctgcctgccagtgtcgccggaaatgcgcaccgtaaaggaaatctactacgtttccggctggggattgacggaaaacgatacatcgtcagacgtactacaggtaggactgctcagacagcttccaaatgacgtgtgccagcagctgctgcaaaggaaggacaaatacgtcaccgtcaatagcgatcagatgtgtgcgatcggagcgaatcggaccgacaactgtagcggtgactccggtggaccgctcaaaacggtcgctgtcaacgcacgtttcgtacagtacggcgtggtgtcgtacgggttgagaacatgcggtaaggaaactgctcctggtgtatacactcgggtggaaaactacatcgactggattttggacaatttggaagaatga

SEQ ID NO: 41 - DNA, 1508 bp, Anopheles gambiae
cctctgcctgcgtcggagagtcgtccataaatcgatctgcgctgttttttaggctgcaaggttcgatttataaatattaactactacaacactggcaaaaaggacgatatcttcccacatacatatagcagtgcaatgatgggcgttcgaaggattttggcagcattgctgctgattacatcctctagcggagtgttatcacaggaagatcccgaatgcaaaacaccgaccatgtcagacggattctgcgtgtccattgaacggtgccggaatatttactccatcattatctcgccgacgccaccttcgcgaggcattcagaactacatcaaccgagcggcctgcagtctgcccgatgtgccccgcagcgtctgttgccaaccgttagaggtcgtacccgctcccacaacaactacaacgacaacaacgaccaccactactaccgtcgctccgagtaccgttgtcgcaccggtcaaaaccaacgccgggccagtgatggtgactggcgtcgagccggacgctggcgccacgctcaactggaatctgctgccaacgagaaactgcggcaccatcacggtcaaccggatagcgcacggtaatacaacgcgcgtgtttgagtatccgtggatggtgttgctgcggtacgaatcgaacggtgtgctgtcggaccgatgtggtggatcgctgataaataatcgctatgtactgactgcggcacattgtgtccggacatcgagcagcatccgattggtgaaagtgcgactaggtgagcatgacaaacgccaacagattgactgtcacgtgtacagtgatggtgaaaaggattgtgcagatccggcagtcgatgtcgacatcgagtccatgatcgtgcacaaagactacaatcgcccgatcaagttccggcacgacattgccctgctaaggatggcacaggaagttgagttctcggattccgttaaaccaatttgcttgccggttaatgaagacgtaaggcgaaaggtattgccaaagtacatcatcaccggctggggtacgacggaacagcaatcgttgtcagacctgctgctgcaagccatcgttaaccatgtgccagtaccggagtgtcagcaaaagatgaacgaaaacttcctctacgttacgctggcggacgagtggcagatgtgtgcggcgggcgaggggctggtcgattcctgccagggtgattcgggtggcccgctagggtttagcgtggatgtggctggggcaaagtttgtgcagttcggaatcgtatcggcaggagtgcggtcctgcggaaaggaaagcgtgcccggcatttacacccgtgtgacgagctacatgaactggatagtggctaatatgaagccataaaattgggtcgtttggttgcgtcaagcactactttttggggtttatctgtgtcgatgatagtaactaaatacgataacgataggcaactggcaatgaatgtaaaatagcaataaagatatgaaatttaaattttacaatac

SEQ ID NO: 42 - DNA, 546 bp, Aedes aegypti
atggcgaacgggaccgtaattgggcatcatcggatgaaatcaccgaaaattgaccggattgaaagcaccttagagtatcccattggtagcaacgtgaaaaactatccatatgaactcatagaccaattggtggcccagcaaggttatgccaatctgttcgacagctatcctgaggatgaagaagtggatgacttcacattccataatagaatgagtttctctgatgacgattttgaggacatatgtgagagtcaaaagccggataaatatccacaacatggattaactatggacaacaagaatgtaactattgtcaacaccaagaacttcacacagcgtgtagaaatggaagtgtgcaggcaagtttggaaacagggtacaccctgtgtgatgtgcgacaaccaattcaagaaaacagaatgtcgacagatcttcctcgagcttactttacacgccttcgataaatcgaaaaaccaaatttacaaggaaaaggtcatgattcctgcgagttgcaaatgtatggtggtccgattcaagggattctaa

SEQ ID NO: 43 - DNA, 2862 bp, Aedes aegypti
cggtatcaagtaagaaagcgtttcatcgagtcaatcgaaaatttattacgctttggagtttccataaaaaatgtaggataatagaatctccaaataaaaacggttctttcttagcgtcaatgattggttgccgtgattttgttgcgtccctagcagactattttgctgtattccgaacttatacaaagttttcgcgttgtttttatgttttatttcacatcaataaacgtcatgttgaacaacccgcagaccaaatttattttatttggcctattttttccatagttgccatctgtacaaattcataatcttagattgtcacacgggtcaacaaaagtgctagctgctatcacggattcatccatttcgaaattctaatgaaacataaattcatccttatcaaaacaggtctggcagcttaatgagtgcttcatcgactccatttctccacgcgatgctatgcaaatgtgattaacgaagtttctccctttaattaacttctcaaacgcatccaaagcaatcggttagcctaggctgattctctctcgcgcaagcaccgacccgatcagtcgatctttttccatgccttcgatcggacgtgtgtcaagtttaacgggtagcttagtgcggttttcgctcagtcgatgcgcaaacagcaagcaagtgtctccagccgatggataagtttttgtgactcgcttcgatcgtgcggtttcgtgtatgagcgcaatatcatcacgactacttataatttaccgggcttacaaactggaaagacgagcagctctattagcgagcttatatccagttggtgcggtcatccagtcgtttccagtggtttatacctactaatggcagagtgaattgtgaatacagcagcaacacatcgtcacagtgattagtgcttcggtattggtgctaaacaaagtgcgcagatcgaggatcgaaatatgtaaaatgaatatttgaaataaatattacgtagtcaggtgccagaatcgaaatgtaaaacgatatctaccgtctgacagattaagtgtttttcgtcaaagtgaaattctagtcaattagaaaatccgtccaatcctgcgaaaggattattagtgaaaatctgttgaaagggtgaataataataattaataatcatggcccaaggagcttcgtgcagtatttggctatcatacggactggtgcttgtactgctgattttatgcaccatcactgttatgataacgcccacagaatcctcatcggccatcccgctgatacgacaaagaacggatgccaatactaccaacggtaatgaatcgtctctttctgatgctgatgtgcagaagcgcatacaggaagtttttaaccgtaagggatactcaaatccagatcctagtccaaatgattccctcgaagcacagcctgaagaagtagcagtgagaattgatagtgctgcaccgacaaggcgacgtaaacgtccactttggaagcttgatgaaaaattcgatccaagaaaatcgtacgtcatcaaacaccccaacggaaccatcacctacgtaccgcccaaggatatagatctcagtggcaccgttgacacgggaactacgaccgcacccgcaaacagcaatgccaacgagctcattgacaaaatgagcgaagcaagtacgagcgatagggacaagttgcgaagctcccgttttgttttcccgagtgatttagagccgcgaattgacaggaccgagtgcacaccggattatcccgtttgtaccaacgttatcgattatccacacgacctgataaacgatatcgtagggcgacagaaggaacgttttgctgaagtgtttgggaatgatatcgtgctgaatgatggcgataaactcgtgcagcggttcgacgtagacgaaaacggaaattcctttgagttcatatgcgaaagccgagaaaggctgatacatccgaggagcgggttcaacacagataacagaacaatcatgattattaacaccaaggaatatatgcaaggcgttcgaatagaaacatgcagctctcaaggacagccatgcgtaaaactgaatcccctgttcggaaaaacggaatgtcggcaactttaccactaccgaacgctactagcgatcgatccccaaaccaaccaaccttacaaggaaaaattcaagctaccttcgtgttgcaaatgtgtgataattaccctcgatgggtcttcatatcgcaagaagagagatacgaaggaaggattgtgatagtcagatagtcgagaaaggattaaaatatggtgaacctgatacaatgattcactcaggaagtgattggaaatcatagaactagttttgctttgacgagaatcgtttttgcataatcgtaatttataaacccgcaagccattaaatgtcgatgttagcttttgttgaattacatataatttgtattaaatagttgatgttttgcttttcatttgtaagaatgagaaaaaaatgaagattttcagcatatgtatagcgaaggttcgttgatttaaggtgttaaaaacaaaaaaaaacacaaataattatttccttacgttaaaaaaatcgaagataatgttagtgctaatgcaaacccgaagtcaatctttgctttattatcgagtattatcattatcattatcagtctcttatacatctaacttgcctgagttacctcagagatgtcaaaaatcttgtgttaacacaggcctctccgctaagggacgaagcctacgtgtcgtttatttatttattttctttattttttcttgattatggaagattactcctaatgcttctgcaactcaactaataatattcccacataaactaaaatctctttatttgaaac

SEQ ID NO: 44 - DNA, 747 bp, Aedes aegypti
atgtttgcattagcactattagtgattttaatgagcccatcatattcatttggattttggcctttgataaggcagagagacatgaaagtgtctacacggattgacaattctaagcaagacatcagacaaacagtgagtgccacttccaggccacaacagtctcttgcttcagtggaaaggagcagcaccatcgctactcccatcaaagccaattacgactttatgttcgtaagcgatgttgagacgaggattgataagtcggatgactgcagtccagattatccaatttgtaccaatgtcatggactatccgcagcaactagtgaatgatataatcgctcgccaggagtaccggtttgcggaagttttcggtgatgatgtggtcgtggataacagtgacactttggagaagcgatttgacacatcagacgacgagtttctttgccccagcgtggagaagttggtgcatccgcagagtggttatacggtcaacgacaagctggtgatgatagtcaatacaccaaattacatgcaaggagttaggatagaaacatgcagtagccctgggaatgcttgccataaactacagcacctgatatcattgtacaccacagaatgcaagcagctatatcattatcgaacattattagcatttgacacgaaaactaagcaaccttataaagaatcatttcgattaccatcatgctgtaagtgtgttataaaacctttacaaaggctacatttgtag

SEQ ID NO: 45 - DNA, 1425 bp, Aedes aegypti
atgcacagcatcagtcgtcacaagcgagcaatgggagcacttttagcggaatacatcgacaagagcaacgaattcgaccgaaacgccttcgaaccggaggacatcgaggcggggattaacaccaagctgacgaaacgttcggacgacccatcgaagtccgggggcggcatgtgcccgagcatcatacgctatgcgcgaccacagaaggcccgttccgctaccggcgagtggaagtacatcgttaacaccggagagcacacgcaaacgcttcgactggaaaagtgcacgacaccccaagacagctgcacttacctgacagacaatttccgctcccggtgcgtacagatatacaactatcatcgtttgctcagttgggacacggcccgaggtcttcacgtggacattttcaaggtgccgacatgctgttcttgtcacatcgatggatatcgggagactttcccgccattcaacggagggggcggtggtggaggaggtggaggtttgagcgagtatgattctaagagtgattcttatgaggatcctaatatcgctgcaagcaacgtcattcggaatacgcagtacagtacgctgaagttcgataacaacgatgagccggagaatgttgaagacaatattgcttatcacttcgccaatggcttccagcgaatgaaaccaccgaagtatgataatggaattctgatcccaccgagtccaccaccacagaagttcacgaagaatcgctacgagcgcccgaagcttgtgccaccgaagaagcagaacctggctcacttcattccgccaccgattttggacacttacctcagcccacctccgaacgaagtcagccactatacccctttcaaacgaggtccacatttcaccaacgacaataccctaaagaggacggctcaagtccaaccgtccagaaatcgtcttcccatccgcaagcagatcaatgtggatcagaacatcgccgaaacggacatccggatcaaccaggtccaagtgatgcccccgaacaaacaggatcgcctaccgccaacgcaagccaccgaaaaacaacgaaaacgatacaccacaactcagcagcctccaacgatcaagaaggagaagacccctcactaccagtcaagacccaaacagcagcaatccaaaccgacctcaatcatcccggtgacgtcacccccaacgacaaccacaacttccgccacaaccaacggtcaccagcggatcaactacaactaccatcccattatcgactttttcggagaagaagaagcccccgagcttccggagcaaatcgaccgtatcggtctgaatagtggcggtggaagtaaacccatcatgggatcatcatcttccatgaacagttggactccgatggtgcactccagtcaagtgcggcccatgaggataccgatctga

SEQ ID NO: 46 - DNA, 732 bp, Aedes aegypti
atgaatgatgaagtgaaagacatcataaaacagattcacaaccgaaaaggatattcaaatcctacacgcactttagcagaggaagaggatgatgagcccgaaaaagtggtcacaagaaaaccacggactaggcgtcccttgaagctgatcggcaaggatttcgatcctaacaaatcttttataatcaagcatcctaatggaactcttacttatgtgtttcctagagatactagctcaaataccatcatgtctactactccatcgaccattgaacctcctgacgtcactgaaccttttgctcaagctagaagcctgtatccagatgacttaatcaatgagataatgatccttaacaatgcaaccttccaaggtgtgtttggagacgatgttgtaattccggatggagatgccctcaattcaagatctgataccgctaatgcaccgtttctttgtgaaagcgagcaactcttgatccacccaaaagaggagctatcccggaacaattcaatggtgtggattgttaacacgaaagattacaaacaaggcgttcgaatcgaaaagtgtctgaaaagacaattaggcaagccgtgtaatttctgtgatgccgatactgagtgtaagcaattattccactatagaacactggtagcagtggacaaagtaacgaaaaaaccatacaaggaacaagttttgttgccaagctgttgtaaatgtgctaaaattttatcgtaa

SEQ ID NO: 47 - DNA, 1173 bp, Aedes aegypti
atgattactgatagcaatagcatatcggcggcagcagtcctatgcgtgcttcagctgatatcggcatcgcctccacaacaacagcaacaaccacagttccaaaagaattgcggactttacggccaggtgccatgtacgtatgttccggctccacctggaatcacgccaaagtgtgcttcccctgggaagacgttttgcgagcagaatcccgaatatccgactcatttgatccagcgcctggttgagcaattgggctaccagcggattctcgccaacgaagaacgtgtggacttcaacgtgaatcgcgaatgggaggaagagcatcaccatcatcattatcaccatttttatggcccctcaatggccactagtggcagttatgggcctcagccgcataaggtcccatatcaaggctacagctatgacctacccaaacagcagcagcagcattaccaacagaatgacaacaccgtgacctttgaccagaaacccccaccaatgcccgttcctcagcccatctacatcccaaagcctcagtattcgtttaattatcacacgtacgtgagacctccggtgaatcacaatcctcaaacgaccagctcgtccggagccactggctatttctatcctcaaccggcgacaccatttagtccagccgaatggttgagaaggtttgcacgtgacctcactcaaaagcagaccccagcaagaggtttcagctaccatcgagtggctggaccaactccttcgccatctcccttcaagttaccacccgaattggaagtgaagccatcgccatttcggttggtgaacgaaacggtatttcacgacgccgtaactcggtcacgtcagaagcgccaagtcaccgaaggccggacagaactttgccagacgcgtgagatgtacgttacgccgcaggcagctttgaacaccaagggcaactggatgtacatcgtaaatcacgaggaatcgcggcagttggtgaaagcggagatatgcacgtcaagcgagtgctccaatctgtgcagcctccccaatgggtacaattccaggtgcgagcaaaagttctctcagaagcgacttttaacgctggaggccgatgggcagagtttgtacgtggacacctattggttcccgagttgctgcgtgtgcactttggcgatgaataactga

SEQ ID NO: 48 - DNA, 1200 bp, Culex quinquefasciatus
atggacagctgcacctacctgacggacaacttccggtcgcgttgcgtccagatctacaactatcaccgcctgctcagctgggacacggctcggggtcttcacgtggacattttcaaggtgccaacgtgctgttcgtgccacatcgacggctaccgggaggtattcccaccgttcaacggccacaacgattacgaaggcaagagtgacgcatcttatgaagatcctacgatttctgcgagtaatacacacgtgaggcacacgcagtacagcacgttgaagtttgatcaccagcacgacgggccggaaaatgtggatgaaaatattgcctaccagtactcgaacggattccagcggttgaagccgcagcaaaagttccaggaaaatacccacttgattccaccgaatggcccaccgcaggcacatctgccgaagaaccgatttgagagaccaaagttcggacttccgaaaaagacaaatctgccaaactacatgacctcgccagtgctggattcgtatctgagcccacctccgaatgatgtcagcttccacgtgccattcaaacgaggaccccacttcaccaacgacaactcgctcaagaggacagcccaggttcaaccttcgcccaaccgacagaaccgactccccatccgcaagcagatcaacgttgaccagaacatcgccgagacagacatccgaatcaaccaggtccaggtgatgcccccgcccaaacaggaccgactccccccaacgcaagccaccgagaaactccgcaaacggtacacaactccccccacgacgatccccaccaacaacaacaacaacaagaaagaaaagatccccaactaccggataccacaactccaccagcaacagtcaagttcggcgacaggaaccgtcaaaacgccgccctttcttccgccaatttcgtccacggtaacgtccacgacgcccgcggcctcgaccaacggccaccagcggatcaactacaactaccatccgatcatcgacttcttcggcgagccggaggtcatccccgacctggacccatccgagccgatcgaccgcatcgggacgtccctcatcaactccggaggtggctccggcagtcactcttcgacgtccctcaacagttggaagcccgtcctgcaccaccagcagtcacagcagcagcagcagcgaccaatgaggataccggtctga

SEQ ID NO: 49 - DNA, 291 bp, Culex quinquefasciatus
atgaacagtatcacgcggcacaagtcggccatgggcgccctgctggcggaatacatcgacaagagcaacgagttcgacaaaaatgcgttcgagccggaagagatcgacggggacatcaacaccaagctgaggaaacgctcggacgaccccagcaaaacgggcggcggcatgtgccccagcatcatccggtacgcccggccccagaaggcgcgatcggccaccggcgagtggaagtacatcgtcaacaccggagagcacacgcaaacgctgcggctggagaagtgcacgtga

SEQ ID NO: 50 - DNA, 1113 bp, Culex quinquefasciatus
atgagcagcactttggcaccggtgatgctcgcgctttgcgtgctgcagcaactggccctggcatcggcctatcagcagcagaaaaagtgtggcctctacgggcaggctccgtgtacgtttgttccggctccacccggaatgacgccaaagtgtgcatcaccggggaagactttctgcactcagaacgaagactatccgacaccgctgataaccaatctggtggaaaagttcggcttccatcgcatcttggctgacgaagcacgcgtcgagttcaacgcgcaccgcggctgggaggaagatcgtcattatcaccacttttacggcggtagttacggtcctccggcgtaccgaccacccccgccgtcctcatcgacccacgagggctactcgtacgacctcaccaagcaacctaccgacaacaccgtcgtgtcgtacgaccgtagtccggtgccccaacccatctacatcccaaagccacagaactcgttcaacttcaacacgtacgtccgggcgccgatcgtccacaagcagcaggtccaacaagccaccggatacttttacccacccccagtgacccagtacagcccagcggaatggttccgacggtttgcccgggatctcagcgaacgaaggggtcaaccgttccagcaccagccgtcaacgcgtgatatccgaccggcaccgttccggttagcacccgagcttgagatacgaccggccccattccggccactgctgaacgaaaccgccctgcgggacagtttggcacggtcacgccagaagcgacaggtcaccgccggccggtcacagctctgccagacgagggagatgtatgtgactccccaggcggcgctaaataccaagggaaactggatgtacgtggtcaaccacgaggattcacgacagttggtgaaagcggagatttgctcgtcaacggagtgctccaacctgtgcatcctgccgaacgggtacaactcccggtgcgagcaaaagttctcccagaagcggctgctgacgctggacagcgacggccaatcgctgtacgtggacacgtactggttcccgagctgctgcgtgtgcacgctggccaataatgacagcggggatcagtga

SEQ ID NO: 51 - DNA, 1223 bp, Culex quinquefasciatus
atgtactccggagttgcgtgctcaaagcccacagattccacatcagagttccggcccctggtgcggctacggtccacaactaccgtgagcgacgagccatccgatacggccaccgatgaggaggtgcagcagaaaatctccgagctattcaaacgtaagggatattccaacccagaccccgatccggaggatcaactacttgaggagtccggctctcagattgaagctagaatagatcctcctaggcgtcgacgaacgcggcggccgctgcaaaagatcggcaaggattttgacgcaagccagtcgtacgtgatcaagcacgccaacgggacgatcacctacgtctttcccaaggaggttctgaagggaaatggcaacgcccaactggtggccgataccacttcagaggacagcaagaaagcggctgaggaaaacgtcgtgcggtatcgaaaaccaccaacttcggaccaagtgacaccgcagaagaaggaatcgtgcagtccggaatttccgatctgcaacaacgtggacaactatccgcacaacaagatcaacgacattgtcgcaaaatacaagcagcagtacgccggcgttttcggcgaagacgttgtggtacccgagggagacgcactggtgacccggttcgatacttccaacgatagaccactttgctattcagtagagcggttgattcacccacaggagggcttcacgaaggataagataaacttgaccatagtcaacaccaaggagtacaaacaaggagttcgggtggaactgtgcagtaaccctgcccaaacgtgcaacgaactcgacgggctaatggggcaatataggaccgaatgcaaacagctgtaccactaccggacgctgctggccgttcatcccaaaaccggagagctgtacaaagaatcgttcaaacttccttcctgctgcaaatgtgtgataaaaccccttactttgctcagcgatggcaaataagcacgcttaaaatcacgtgcggatgaatccgcacaagtaaaattcacaaattcaggacatcgcgatattaaaccattgacaaaagcttacaaattgcttttactcagaatgcgtgatcgcactaattgactaagtggcaacctgtaatgctgcgtgtacattctcatcaaatcgaatacgccataatgtgtagttgtttgctcttaaaaataatatgtaataaagtttgtattttatagtaa

SEQ ID NO: 52 - DNA, 792 bp, Culex quinquefasciatus
atggctcacattacacagctagtgataatattgctaatcttggttgcaattctccgcctagtggattcggctcccaacgctcgcccaatggtccgtcagcgggttaaaccattggtcggtttatccaacagtcgcaggaagcgacctcttcaagcttcagataccgtgcgtgatccaaacaaatcatacctcagcggccttaaccatcgcagtacatacgacaccaatcagcacaataccggcgacatctacttcccaaacgacccaccatcgacgggtcccgtccgattggaacactgtggcccggacttcccgatttgtaccaacgtactggactacccccagcagctggtcaacgcgatcgtggcccgtcacgagcatcgcttcgccgaagtgttcggaaatgacgtcgtcgtgaacagcggagatcacctggacaagcggttcgacacgtccgacgacgagttcctgtgccagagtcgggagaagctggtgcatccacagagtggctacaccatggacaagcggctggtgatgatcgtcaacacgcccagctacacgcagggtgtccgcatcgagacctgtgccaacggggggcgatcgtgccataagctggatcacgtgttgtcgttctaccggactgagtgtaagcagctgtaccactaccggacgctgctggccatcgacacggttacgaaccagccgtacaaggagtcgttccgggttccgtcgtgttgcaagtgcgttatgaaaccgctcgggcgtggatcgcggtatagaagtcgtggttga

SEQ ID NO: 53 - DNA, 1464 bp, Anopheles gambiae
atgcaatctcgcgttaagctaacgctggtggtcgttgtcctttgggcaagtgtactgctccatcataaccgtgccgcactcgcgtccaccgactccggcctgcccgacttcgagctggacgatggcaaggacgaggcggacgacgagtactactacgtgaacgacgggaccgatcagcagatgcaaccgtcgcacaaaatcatcagctacgctaaaccaccaccaccactaccaccgtctgcgcccgacgccggccagccggatgcgagcgaaccgttcctgatggaggacgacgatacgagcttcgaggtgatggacgatgtcgactttgtcgagcaggggccggccatggacttccagcggaaggcggagcgcatgaagcgcatcatgctgaaagcgttcgccaaccgggagtttcagcggaagtttggcgaggtgctgccgctgctgaaggtgatgtccaagacgcaaaagtcgacactggccgcgctgataacggcgcaggtcaactcgcgcgacggccacacactgtcgctggagcaggtcaaatcgatgttcggtaaccggccggagctgattctaccgctcgtctacgacattgccaacatgatccgcacggtggcaaagaaggagagcctgctgcacgatcagcaagagcagctggaccaggccgataaggcactggtggaggatgaaggtgtcctgtccaatcatctgcttcgccgtagcttcagcattcgctccgagccccatgggtttcgtatgaatgatgctgcaccgcccgccgccgacctcaaggatggacggttgatggttgacgatcaggatacggctgaagttaagatcatcgccgcagaatcgacagccaacaacgccacccaggaagagacagtcggccgttcagcccgtagtgaaccacagcccttcttcgagaagctcgtccaagcactgccccgcttcaacgtacagcaaacgcacgacaaacgttcagacgatcgtatgacgtaccacgagcgtaagctcaacatgaccgcgttcaacgcaaccggcagccagcgggatcagctcgcgatggcatcggacggtccaatcccagtcaccctgcccaaagtgtcgcccaaacagtcgcgcccagtgtcctcgaacgcggtcagcgtactccctgcgagtacggcccgcccggaagcagcgcccaccagcgtcaccgaggagcacaaactaacgctggaggaaatcgaagatctagccttcgccgggctgaacggaacggaggtggatgcgtacggtggtgcggcatccaccctgcccggcaatggcacatcggctgacggtggtagcccagtggcggagaagctcatcggtggccggcagcgaccgccggcactgcacacgctgcagccgagtgaaaagtgtgagcacttctcgggcggtgtttgcatccgggtcgccaactatcccacgtaa

SEQ ID NO: 54 - DNA, 1476 bp, Anopheles gambiae
atgtacagcatcacgcgccaccggcacgccatcggggccctgctggccgagtacattgacaaggcgaacgcccaggaccgcacggtgtacgagccggacgagatagcgcagggcatcaacaccaagctgagaaagcgagaagatgacccatccaagtccggtggcagcatgtgccccagcatcatccggtacgcccgaccgcagaaggcacgctcggcaactggggagtggaagtacatcgtcaacacgggcgaacacacgcagacgctgcggctggagaagtgcagcacaccacaagactcgtgcacctacctgacggacaacttccggtcgcggtgcgtgcagatctacaactaccatcgcctactgagctgggacgccgcccggggactgcacgtggacatcttcaaagtgccgacctgctgctcctgccacatcgacggctaccgggaaacgttcccaccgctcaccagctacaacagcgacttcaagtcgaagatccacgaggacccgagcgagtccgcctcgaccctgatccgcaacacgcacagcaaccaccaccagcagcaccaccacagccactactcgacgctccagttcgatcaggtcgacgaggaggagccggaagataacatcgcctaccagttctcgaacgggttccagcgcatcaagccaaagtacgagggtgcgctacatctccctgcggtgcctccaccgcagccaccaccaccccaaggaccggttggggccgggctgggcaaaacccgattcgaacggcccccgaaacatccggccatctccaaaccgaagcatccacacttcatcgcaccaccaacgctggacacttacctgagcccaccaccgaacgatctggcgtacggcatcccgttcaagcgcggtcctcactacaccaacgaaaatacgctcaagcgggcgggaaacgtcgccggacctaatcggcgaccgttgcgcaagacggccaccgtacagcatcacgccgaccagagcattgccgagacggactcgcgcctcaaccaggtcgccgtgctgccgccgggcaagatggacctgctgccccaaacgcaagcgcaaaatatcatcgaaaaacatcgccgtcgacagcagacaactgcccagccgccgcttactacattgcagcagcagcagcagcagcagcagcagacccacatattccgtatatcacaaccatcgacaccttcgatggccgttaatccaacggttccgctgtccacccagccacagccaccgagcacggccggtacgagcacgaccacggtcacgtcgaccaatgggcaccagcgcatcaactacaactaccatccgatcatcgatttcttcgaggaggaggaagtgcccgatgtgacgcaggagcagatcgatcggatcgggctgaacagtcactcgtcactgaacagctggaagccggtcattaccggtcggccacggtttcactga

SEQ ID NO: 55 - DNA, 1164 bp, Anopheles gambiae
atgaaatccctttcacagattttgtccctcaatcatctttcgcgcacactgggaactccttcgccctatccccatccaacactcgctccccaaaagcccgcctgtggcgcgtacggccaaagcccttgcgcattcgttcctgccccacccggaatgacgcccaagtgtgtctcacctgggtccactttttgtgaaacgaatcccgattatcctgcctaccttattaagcatctggtggaaacgctcggctatcagcgcatcattgccagcgaagagatggtcgactttggtgcgaacaaaccgctggaagaggaggaacatctgcaccatcattatcatcacttttatgggtcatttgcggcgatggatcaagcttccaagccacaggcgcctaagcactccagccctgggtacagctaccttacaccaacgcaacaatcactcggcacggtaaactacgagacgaagcgtccggcaccggttccacagccgatctacattccaaagccacagcactcgtaccactacaactcgtacgttcgcgcgccaatgtacaaccggcagtcggatcggcaaggatacttttatccatcacccgggggttctgtgtcgaattcgccttcctcaagctctccagtaacgcagtacagtccggctgattggttgaagcgcttcgcccgtgatttgtccgatcggcatcgacgcgaggcacggctggccgcattacgaagggtagatggacctgccgatccgttcgacaacgaaccaacacccttccggttgccatccatggtaaatgaaaccgtttacgagcgtttgctggcgaaaaacatgcgcgcaaagcgacaagcggcgggtggtgtgaaggaaacgctgtgcagcgtgcgggaacgatacattacaccgcagacggcactcaacacgaaaggcaattggatgtttgtggtgaatcaggaaaactcgcggcagctcgtaaaaacggaaatttgtgcgtcaacggagtgctccaacctgtgcagctttccgatcgggtacagctcccggtgcgagcagcggtacgtgcagaagcggctggtcacgctggacccgaccggccggacactgtacgtcgacacctactggttcccgagctgttgcgtgtgctcactgtactcgggaaattag

SEQ ID NO: 56 - DNA, 1181 bp, Aedes aegypti
atgctaattttcctaaactctcgtttgattgtcaccgttgagcgccttttcgagcagaagtactccgataaattatcattaaaccgagacagtcaaccgacactcgcccgtaccgccgccataagcagttccaaccgattgaaaaatccaatcagtcgaaatggcagtaacttatccgaatacgacctggaagtaggagagcgaacacctcttttggtttcaagggttcgtttcgcacctgaggtggacgatcgatctcgtcagattcaaaccgtacaaaccacagcccttcttggcattttaacgctgctcctgttccttctgctgggcattataatagcagtttatttgcttctgatgcaagtacctcgtccttggcccgtgtctcatccattttacctagtggagcgaaatgtctggtggaaacaaccagcagagcaattcgagttaagtccgttggaaaaacgtgcaactcagaatgtaataattctgcacacgagaagtgagacatgccacgatcaagccgcatgtattcaattggtacagaaactacaaaacgacgcgtggagtcaaaacggaacgcacattccgtataatttcctagtaggtggagatgggaaaacgtacgaaggcagaggctggaaatctcaacacgggtttccaaatctccccggaataaacgatacaattgttgtaggcatgatagggaccttcaatgatcaacggccagaaaatgtgatgtacgcagaaacaaaggcactaataacggaatccatcagaaggttttgcctatcgccaaactatcgactatttggcgtaattgacgactcaatacagaacaacgatgctgctggactatacgcagagattaaagagtggaggcattggcagggattcgttacagtttaggacaaattttatagctcaattttgaacaatcagtgaccgggactagtgttagttcgcaagtattatatgtttttgtgaaagattcgatataaactgctgattttatttttttaatgacaagtcggattttctttcaattcaaagttcctttcttttaaaaacttgggcatgtttagaaaaatatacgcgattcttctgagggcataaacatgagggcagcaccttaaaataatattattattgaagaataaatttcattcagtatttctctg

SEQ ID NO: 57 - DNA, 909 bp, Aedes aegypti
atgctaattttcctaaactctcgtttgattgtcagcgttgagcgccttttcgagcagaagtactccgataaattatcattaaaccgagacagtcaaccgacactcgcccgtaccgccgccataagcagttccaaccgattgaaaaatccaatcagtcgaaatggcagtaacttatccgaatacgacctggaagtaggagagcgaacacctctattggtttcaagggttcgtttcgcacctgaggtggacgatcgatctcgtcagattcaaaccgtacaaaccacagctcttcttggcattttaacgctgctcctgttccttctgctgggcattataatagcagtttatttgcttctgatgcaagtacctcgaccttggccagtatctcatccattttacctagtggagcgaaatgtctggtggaaacaaccagcagagcaattcgagttaagtccgttggaaaaacgtgcaactcagaatgtaataattctgcacacgagaagcgagacatgccacgatcaagccgcatgtattcaattggtacagaaactacaaaatgacgcgtggagtcaaaacggaacgcacattccgtataatttcctagtaggtggagatgggaaaacgtacgaaggcagaggctggaaatctcaacacgggtttccaaatctccccggaataaacgatacaattgttgtaggcatgatagggaccttcaatgatcaacggccagaaaatgtgatgtacgcagaaacaaaggcactaataacggaatccatcagaaggttctgcctatcgccaaactatcgactatttggcgtaattgacgactcaatacagaacaacgatgctgctggactatacgcagagattaaagagtggaggcattggcagggattcgttacagtttag

SEQ ID NO: 58 - DNA, 867 bp, Culex quinquefasciatus
atgtacccctgggagcggttgcaggaggtaccggaagacaaaccccgtaatggcgcccgaaccggcgcggtttgcagctcaaagcgcctgcggagtccaatcttcagaagcaacagccaaacttccgagtacgatgtggaagcggcggcaggtgagcgaacgccactgctgttcactgcgaagatctccggcgtggagtccgtcgacgagcgtcgccaccgacagctgccttcagcccacgcaacagcgctgtttgggattttggcgctgattctgttcttgctcgttggaatcatcatcgccgtgtacttgctgcttttgcaagttccccgcccctggccggtctcccatccgttctacctggtcgagcggcaaatgtggtggccctactcggaaccactgcaggcctctccgctgaacaagtcttccgtgctgaacgtgattctgctgcacacccgcagtgaaccctgccaggaccagtccagctgcacacagttcgtgaagcaggtccagaacgacacctggacgcgcactggagcgcacattccgtacaacttcctgatcggtggcgacggcaaaacgtacgagggtcgcggctggaaggcacaacacggcttcccggaccttcccggccggaatgacacgatcgtggtgggaatcatcggaacgtacagcgaccggcatccggatgcggtaatgtacgccgaggtgaaggccctgctcaccgagtccatccgaaggttctacctcttgcccggctacaagctgtacggagtggtgaacgggtcgcagccggagaacgacggcaaggcactgtacgcggagctgcagcacctgaagcactggcggggactgatcaacgtgtag

SEQ ID NO: 59 - DNA, 2558 bp, Anopheles gambiae
cacgccacaccgttcatccgttcagttctatcagtgaaataccacccgtcctctctactgtctagcgagcccaggagtgttgccattaaactgccacgcgtacgtgcaccccgtcacaaagtgtctgacccgtggcggaaagttcaaagtgaatcaataattaatcgtcaaaacataaaggaacgagcaaaaaaagaaccattgctaccgtgattagtacacgattcctctaagtgaaaacgaatctcttcccttatcgctgaaacgccgacgcggctacccgaaacggcccacaccgaaaaagcctatgaagttgtgcggcacgtggcgatcgcgctccatcgcactttccatccagcaatcgaagtgtgcagacgggtgtgctgaggtctgaggagtcggctccggcggcgacagctaagtctggctggtgcatctcgtctgtcccggcgggccaccacccccacccgtggtagtcggtgtctggagcgcatcgcggcacgagcatgtgcaaggagcagctggcctacgcagatgacaattttgcaccgctggcgtagggtgccaacgcgggaacctccttaggtaggcggcctactgcgcttccctaacacccgttcgacgctgcttttccaaccaaccacctagtgccaacgattactagaccaacgcaagagtgtcaatccatctcgaaccgaatcgacgctgctttcccgaatacaatcttcaattcctccgcctcctctatgggctaagggtttgcgggccagcgaaggcaccgctgcaggctcccgacatccttatattgttgccaaccttccatccctcccagccagcaatgtatcaggccgcgcgcaccgttgcggcgtcgagctcgagccggctgcactcccccgttgcctggagccgcaagtccgtgcaggagggctactacgatctcgaggcgggcgaaacggaacgaacgcccctgctgtacgtgcgcgacaatggacgctaccgggcgaagagcctgcaccgtgccaacgatccgaaccgggtgcatccggtcgcgctggggctgatggtggcgctgctcgtcttcctgctgatcggtgtcgtgatcggcgtctatctgctgctgctgacggttcaacggccctggcccgtatcgcatccgttctttttggtcgagcgacccgcctggtggcagtatccggtggcgctcgaggcggccaccctcgaccggctcgccgttactaacgtgatcgtgctgcacaccgactcggaggattgtctggatcaggagcgctgtgtgcgctacctgcaaaataccgagcggagctgctgggcggcacggcgtgaccacatcccgtacaacttcttgatcggcggggacggtgtgacgtacgaggcgcgcggctggaagagtcagcacgggttcgtcgatctgcccggccgcaacacaacgctcgtggtgggcatgatcggcaacttcaccgaccgtcaaccggcggaagtacagtacgccgagctgaaggcatttatcaccgagtcgatccggcggcttagcctctcgccccagtaccgcctgcacggagcggtcaatgcaacgcgtccctcgcgagacggtacaatcgcgctgtacagtcagctggagcgatggccacactggaaggggttcgtcgctcgcgaccaaccctgatcatcgtttgcgccattttcggacaacgcggaagtacactgcgctgcgctttctgtgggacatattttattaggccaaaaagctgtgtagaggttttccttgtacccgataggctcacaagtacatctccgtgtcgttcttgccatatacatatatattctgagcatcttcctttgttttgtgagtgtgtggtcccactaaaatcaacctaagtccgcgggtatgggcccgtacgggtagctctaaaagtattacactgtgcctaatgctagacgccattctgtggcgtgccttatacgtttcgtggccagaaagcgcactcgaatacacactcgaaaaacttcactcacttaaggaaaaaaagtagggaaattaacaaaacatgggggcgataagaaaaacactgtgaaaatagtataaaaaaccaacgaaacgataaaaagaaaaaaaagagggaaatacacaaaaaaacgaagtttaacagctaccaatatatgaagtacgcgtttaaagtctaaaccctgtcagcttaattacacaatcatcttaaacctgccgagagcgtggattccgccgatctgacggacacccctccctgctccactccaacgataggggttagatgttatcacacaaacacaccactcacacatacatacatgcatcctctatacactacgctcttagtactagtgctgtactaaaaacaaaatctctatctcgcaggttcgccgcctgcggttgtttctctctcgctctctctctctctctctctctctcgctttctctctatctctttttggtcgctaatccacctccagcttgcggaagctgccggtgatcgtttccatcccgagcgagctgttgctgttgttgt

SEQ ID NO: 60 - DNA, 1548 bp, Aedes aegypti
atgctcagtcacaatctatcaggaaaggaggagcaaacagtgcaaaaaatggcccagaaaccgtacgtcgtaatcaccgaacaaccgcagtcgaaagctttgcggtttcgctacgaatgcgaaggacgatcagcaggctcgattccaggagtgagcagcaccgcagaccacaagacatttcccacaatcgaagttcgtggctataccggccgggtggtggttgttgtttcgtgtgtcaccaaggatccaccctatcgacctcatccacacaatttggtgggcaaggatggctgcaagaaaggggtttgtacggtggaaatcaacaaaagcgtcatgagttatacgttctgtagtttgggaattcagtgtgtgaagaaaaaggacattaaagatgcgcttcgactgcgtgaagagattcgagtggatccgttcaagacgggttatggccacgggaggcaaccggcttcgatcgacctcaacgccgtcagactatgtttccaagcatttctggaaggaccgcagcagggacattttacgaatccactagtgccagttgtttccgacataatctacgacaagaaagccatgtctgagttggtgatatgcaaactaagtcacgtagcggcaccgatgtcaggaggaaaagaagtcattttactgtgtgaaaaagtggcaaaagaggatatagcagtgcgtttctatgaagaacaccaaggtaaaattgtatgggaagatcaaggcgaattccagcattcaaacgtccacaaacaagtagccatcagtttccgaacaccacgatatcgatcgctggatgttgacttccccgtgatggttcacattcagctgcagagaccatcagatggagcaaccagtgagcccgtaccattcgaattgattccagtagatggggacaacttttgcaagaagcggaaacggtcccagttcaacagtttcgagttgaccgaacagaacacacgtaaggatatgcaacatgctgcatcgatggagccaaaagaaaggatgataaagatagaacctatggattcccatttccagcagcagtataccgctcaaaacgcatatcgcaatcctacagagtcaccggatggtaacatgacaccgatgactgccgcttcgccgtacgaaggagctatcggttatcaagctggtaatgaatattacgtcgtgaatcatcgatatcaaagcaactacaacaatttttccgttggtggaccctcgaatggctaccagcaataccactaccaacaaacaggagtacactacggcatgaacaacctagccggagcaagcctacctgtgaatggccaacaaggtttcaatctgcagcagcaacagtcacagatgcccgacaatctcgattgcctgctagatatggaactggcaaaggggttcccgatgaactcgtcggaaatcaaaaccatgatcggacagatcgagccacagcgcatgcagcaggaagaggaaaatttgtccaatagcttcaccaaactgacaaccaacaccactgtcaacaacatgaacaagtag

SEQ ID NO: 61 - DNA, 1740 bp, Aedes aegypti
atgggaccaaacgacaacaacgttatggaagatgatcccagcctgccggatctgcccaacaacctcatagtaacggatgacattttggacctaatcattgatataatcgaccaagaaatgccaccaacagcgcaagaaagaccgcacgtcgtcatcaccgagcagccccagtcgaaagcgctgcggttccggtatgagtgcgaaggccgttccgccgggtcgatccccggcgtccacagcaccccggagcagaaaaccttccccgggatcgaaatccggggctacaagggccgagcggtggtggtggtgtcctgcgtaaccaaggacccgccctaccggccccatccgcacaatctggtcggcaaggagggctgcaaaaagggagtctgcacggtcgagatcaacagcagcaccatgagctacaccttcagcaacctgggcatccagtgcgtcaagaagaaggacatcgaagaagcgctccgcctgcgggaggaaattcgggtggacccgttcaaaactggatacggtcacgccaggcagcctgccaccatcgatctcaacgccatccgtttgtgcttccaggtgttcctggagggtcaacagcggggccggttcacggaacccctgcagccggtggtgtccgatgtgatctacgataagaaagccatgtccgatctggtgatctgtaagttaagtgacgtaaccgctccggtagccggtggcagagagattattttgctgtgtgagaaggtcgccaaagaggacatcgccgtgcgtttctacgaggaacagcacggtaacatcgtgtgggaagaatacggcgagttccagcataccaacgtgcacaaacaggtggcgatctgcttccggacgccccgataccgaacgctggaggtggaacatcctgtcatggtgaacattcaactgaagaggccatcggacggtgctaccagcgaaccgctgccattcgagttgacgccccttgactcagccaaacgaaagaaacgcaagcctaacacctggggggacaccccagaacacatgccagaagcagcccgccatccgtactacgcaacgttgggcaatgtgccgggagaagctatcaaaacggaacctagagattcaccaacgcacccgtttaacttcattggaaactaccgtcaaccgaacgagtccccgtccccgatcgagcgatccccactttacggcaacaccaccccagtcggacaaacgtctccctacaatgccggcagaaccagcgtgactccaacaccgggcggctatcaacccaatgtgatgaatccagatttcctgctggggggcacccaacagttccagaatcagtacgcctttcccacactgcccccgaccaatggccaacccatgtacctgcagcaaccccaacagcaacaacaacaacaacagttccaaccacccgccaacatgaacaaccaacagcagttcaacgtgagcaatctcatagaccctcaggatcaactgcctcagccgggacccagtggcgttcaggcggttccttcgtttcaaccctcgggcagcataggcgagatcaacatcagcagcccctggctaaccatggactcgtcggagctgaaatcgctaatggtccacaccctgtccgatatgaagcaggaacagcaacggatccaacaggaggccgaaaccctctcggacagtttcgacaggttatcaacgaacctcaacaacctgaacaaaccgtga

SEQ ID NO: 62 - DNA, 1587 bp, Culex quinquefasciatus
atggccacgccgtcccagaaaccgtacgtggtcatcaccgaacagccccagtccaagggtttgcgcttccgatatgagtgtgaaggtcgctcggcgggatcaatcccgggtgtgcggagtacaacggaacacaagacacatccgacgatcgagttgcgcggctataagggtcgtgccgtggtggtggtgtcctgcgtgaccaaggatccgccgtaccgggcccacccgcacaacctggttgggaaggatggctgtaaggagggcgtatgcacggtggtgctgaacagtgccacgatgagttacacgttcaacaacttgggcattcagtgcgtcaagaagaaagacatcgagggagcactgaggacgcgggaaaagctgcgcgttgatccgtacaagaccggctttggacacgtgaaacaactggccacgatcgatttgaacgcggtgaggttgtgcttccaggtgtttatcgagggccaacagccgggacggttctcggaaccgctgcaacctgtggtgtcggatgttatctacgacaagaaggccatgtcggagttggtgatctgcaagttgagtcacgtgacggcacccactgctggagggaaggaaattatcattctctgtgaaaaagtcactaaagaggacatctctgtgcggttctacgaagaacgggacggaagaatcgtttgggaggacgttggcgagtttcagcacaacaacgtccacaaacaggtcgcgatctgtttccgaactcctcgataccacacgctggagacctcccagcctgtgatggtcaacatccagctgagaagaccatccgacggagctaccagcgaacctcttcccttcgagcttcttccacttgacgccaccggactgtctcagaaacgaaaacgacccaagttcaacagctccgaggtgctggaacaaagccacggtggagcacctcccgctggatcctacggacagatgcttccgaccgtcggcgaacatgtcaaactcgaacctcgcgaacagctgttcggcttccagggaccctaccgcaacccgaacgagtcccccgagcactctccaggaatccccaacgcatacccggaccccaacttcccaggtcccgcgtccacccagcccaacgacttcttccagcagtacccaccaaaccactacaactacccgccaaaacccacccaacaatatccgaaccaacaacagttccagcccaacttccccatgacccaacagcccggaccaagcacctcgacagcgcctcaacccacctgccagcagatggctgcagcccccggagtgccaccccaggagtacaatctgagcagcctgctggacatggacattgggcgggactttgccatgaactcgtccgagatcaagtccatcatggggcacttttcgacggcagcgtcagtagctgtgccaacggaacagcaacagcagcagtatcagcagcaagtgcagacagtgcagcagcagatggtgcatcggatgcaccaggacgaggaggagaatctgtccaacagttttacacggctgacgacgaatccgatgaatgatttgaacaagttgagttga

SEQ ID NO: 63 - DNA, 1587 bp, Culex quinquefasciatus
atggccacgccgtcccagaaaccgtacgtggtcatcaccgaacagccccagtccaagggtttgcgcttccgatatgagtgtgaaggtcgctcggcgggatcaatcccgggtgtgcggagtacgacggaacacaagacacatccgacgatcgagttgcgcggctacaagggtcgtgccgtggtggtggtgtcttgcgtgaccaaggatccgccgtaccgggcccacccgcacaacctggttgggaaggatggctgtaaggagggcgtctgcacggtggtactgaacagtgccacgatgagttacacgttcaacaacttgggcattcagtgcgtcaagaagaaagacatcgagggagcactgaggacgcgggaaaagctgcgcgttgatccgtacaagaccggctttggacacgtgaaacaactggccacgatcgatttgaacgcggtgaggttgtgcttccaggtgtttatcgagggccaacagccgggacggttctcggaaccgctgcaacctgtggtgtcggatgttatctacgacaagaaggccatgtcggagttggtgatctgcaagttgagtcacgtgacggcacccactgctggagggaaggaaattatcattctctgtgaaaaagtcactaaagaggacatctctgtgcggttctacgaagaacgggagggaagaatcgtttgggaggacgttggcgagtttcagcacaacaacgtccacaaacaggtagcgatctgtttccgaactcctcgataccacacgctggagacctcccagcccgtgatggtcaacatccagctgagaagaccatctgacggagctaccagcgaacctcttcccttcgagcttcttccacttgacgccaccggactgtctcagaaacgaaaacgacccaagttcaacagctccgaggtgctggaacaaagccacggtggagcacctcccgctgggtcctacggacagatgctcccgaccgtcggcgaacacgtcaaactcgaacctcgcgaacagctgttcggcttccagggaccctaccgcaacccgaacgaatcccccgagcactctccaggaatccccaacgcatacccggaccccaacttcccaggtcccgcgtccacccaacccaacgacttcttccagcaatacccaccgaaccactacaactacccgccaaaacccacccaacaatatccaaaccaacaacagttccagcccaacttccccatgacccaacagcccggaccaagcacctcgacagcgcctcaacccacctgccagcagatggctgcagcccccggagtgccaccccaggaatacaatctgagcagcctgctggacatggacattgggcgggactttgcgatgaactcgtccgagatcaagtccatcatggggcacttttcgacggctgcgtcagtagctgtgccgacggaacagcaacagcagcagtatcagcagcaagtgcagacagtgcagcagcagatggtgcatcggatgcaccaggacgaggaggagaatctgtccaacagttttacacggctgacgacgaatccgatgaatgatttgaacaagttgagttga

SEQ ID NO: 64 - DNA, 2625 bp, Culex quinquefasciatus
gatgagcccagtctgccggatctgccgaaggaaataattgaagcgaatgacctgttggatctaatttcacatataatacagtcagacatgccaccgacagcgcccgagaaaccgtacgtggtcatcacggagcagccccagtcgaaggcgctgcgcttccggtatgagtgcgagggtcgttcggcggggtcgatccccggcgttcacagcacccccgaacagaagaccttcccgagcatcgaggtgcgcggctacaagggtcgggccgtggtggtggtttcgtgcgtaacgaaggatccaccgtaccggccgcacccgcacaacctcgttgggaaggagggctgcaagaagggcgtctgcacggtcgagatcaacagtgccagcatgagctacacgttcagcaacctgggcattcagtgcgtcaagaagaaggacatcgaggaggcgctccggctgagggaggagatccgggtggatccgttcaagactggttacagtcacgccaagcagccggccacgatcgatctcaacgcggtgcggttgtgcttccaggtgtttctggagggtcagcagcgggggcgcttcacggagccgctgcaaccggtggtgtcggacgtgatctacgacaagaaggcgatgtccgatctggtgatctgcaagctgagcgacgcgtgcgcctcggttgccggtgggaaggagatcatcctgctgtgcgagaaggtcgccaaggaggacatttcggtgcggttttacgaggagcagcacggacacatcctgtgggaggacgtgggcgagtttcagcactcgaacgtgcacaaacaggtggcgatctcgttccggacgccccgctaccggacgctggagatcgagcagtcggttatggtcaacatccagctgcgacgaccgtcggacggtgccaccagtgaaccgctgccattcgagctcttcccgctagactcaggtaggcgtagattctggtcccttcagaaggatatcctgaagaatgactctccggagaatgaagtgttcaagaagattttgctcgagggtagtagcggtgcggttgcgcccaagaaggtcctcgttcctcagcagcagcaggaggatgaggttattgtgttgttggatactccgctggcggaggacaagccgatcgtggcggagcagatgccgagtgaacagaaaacgaccgaatggatcgaacgaaacgaatttgatgatggggataatagtgtgaatgccagcgttgacaatcagcttatggatgaggggggatcggttgagcagcaggttccgaaggaggacgaggacaagacgttgaacgagctgttggagcaggtcgcggagttggatgagatctacgaggatcatcagttgaggcgggagaacatgatctttgagaatgagctcaagaatttggagaagagtgttccgacggggttgattgggaacgggggtgacaagatggacattgatgacgtgtttgacgatgccgcgacttatacaagtctgcaacgtgccttcaagaatccggtttcgcttgcgttaggtcctccggttccgccgcggcctcacaatgcgctcgagctggaaccgggtgtttacgatgcggttgaaccgatgctcatttgtccaccgagcattgaggttagttcgctgaagcgggagaacaaggaagatgagaagttacctcctcttccgccgaagcgggccaaaccgaacggttcccagaacaaggagaacgctatcggggacactggcgatgaggtcattctgcacagtatcatccgtaagggttcgatgcgttcgttgactccgcgtccccagtcggatcagatcatcatcatgaagagtccggacagcccgccgaacaagaagcttcctccgacacctccggcatcgccgaacaagaatgagtacggaactcttccgaagaacaagaaacccggattcttctcgaaattgttttctcggaagaagagcaaatctgacctgtcggccagtacgaccactttgacgcagaaggacactcccggagcgtccaaggaacctagcttggcaaatttcgaggccaccgagacgactcgcaagaattccgagaagcataaggccggcaaaccagtcgcccgaagcgtcagtagcgtgtcctgcaagcgaccctcgaccgatgccaacccggacgtgatctacatcccgttgaagggcgatggaccctcgaccacgaatctgacctcccgcaccggcaacggcagcggaacgcatctgtccctgcccgggaatgactcgtacgaacgggccagcaccgcttcgctaccacccctggaccggaagacggtcagcgccctgcagctggacgtccccatccaggacggtaacctggagctggtcgccattgccgatgcgcggagtataaagaacctggtcgagggcgactttggcatcaagctcgaccccagcgtggacctgaccgaggccgaacactttgccctgtacacctcgatagccccgaacgccgccctcagcgagtttgacgaaacgtcctgctactacgctccggtcgaacccggcccacttccccagcaaccgatccgcctcaacagcaactcgtacagtgcggatgtctaa

SEQ ID NO: 65 - DNA, 3190 bp, Anopheles gambiae
ggtttcgggagcagtgttcagacagtttttcgtcctgctgcagaacggttcagtgttgaaggcgtcctagctagtgcaccgggaacttccccggggataaaccaaaaccattggaggatagcaaagtttgcttaaattgtgcacacaaggaagagctttcgataagtcgattgctagcggttgccaccagcggtggtgtgtgacattgtacccgtttgccggcggtcccgaatggtgtgcgcctgcttctggagcacggttagtgttgagctgcaagtgataagggcagcctcggatgccccgttggcagcgttagtgatctagtttattgtattgtttgtcatcgcatcaacaagatgatgatcagtgatgttttggtacaagtaaaaacgtaatacattagtacaaacagtaactattacattttgatatttgaaagtgagcatattgaagaagcataaactttagagcttaatggcggagtagggcgtactacaaatcagcaacatttaattgaagcaattattattaccgtgtgccattcctctgtgtttgtgctgattacccgaccacctctggtcaagtgtttctctgtgtgtgtgtttgtgttgtccacagtgcgagagtgcattcacgtgcccagcagcacgactgcacttgacttcaacgtcgaacgaggttcgacatcgtcggctcacgcagcccgtcggtgggagtgaacatttgactaaaccacaaacacatctttggcagcaaaacagtacatcagcatcaaaatactatagcagccatatactattcacaccacacaacagcaatggcgggttatgtcaacggtgcagatgcagcatttctaccaatagagggcattctaggagaaagtgacctgttggatgatattattcacgtaatcggtaaagatatacgcgaagagatgcccccagtacccaaccaacgaccgtacgtggagatcacggagcagccgcacccgaaggcgctccggtttcgctatgagtgcgaaggccgctcggccggatcgatcccgggcgtcaacaccacggccgaacaaaaaacgttcccgagcatacaggtgcacgggtatcggggtcgggcagtggtcgttgtgtcctgcgtcaccaaggaaggtcccgagcataagccccatccgcacaatctggtcggaaaggagggctgcaagaagggtgtctgtacggtggagatcaacagcacgacgatgagctacacgtttaacaatttgggcattcagtgcgtcaagaagaaggacgtcgaggaggcgctccgactgcgccaggaaattcgggtcgatccattcagaactggattcggtcacgcgaaggagcccggctcgatcgacctcaacgctgtccgactgtgcttccaggtgtttctcgagggtcagcagcggggccgctttaccgagccgctcacgccggtcgtgtcggacatcatctacgacaagaaggcaatgtcggatctgatcatctgccggctgagtgactgtaccgccccggtgtccggtggcaaggagatcattctgctgtgcgagaaggtggtaaaggaggacattaaggtgcgctttttcgagaagaagggcaacgcgacggtgtgggagaactatgcggaattttcgcacactgacgtgcacaaacaggtggcgatcagcttccggacgccaccgtacagaacgatcgacatcagtgatccggtgcgggtcttcgtacagctggaacgcccgtcggacaacacctactcggaggcgcgtgacttccagttcatcccgctagacacagtcgatctccgaagaaagcggcagaagctgacgggttcgtcgaatgtgtttttgccggtagtaacggccccattgccgggcccatcgcccccgagcagtctgggcatgccgggcaatataccgaacctgtcgcagctggacgcaaccggcggacagagtgcgtcgacgagcggtttaccccgcggtatttatacctaccacaatgcaagtgcttttcaacagatgccaaaagaggaaatcaaaaatgaacctggagactctccgagccacaatccctccaaccagtaccagctgcaaccgatgcagcccatgtttaccgcccagagcacctcccccggtccagaccgttcaccggcgacactcacgccctccccgggcatcggtggtcccatctcaccgcttgaccctggcaatgtaacgccaaccccaccggcctacaccacactcggcggtaccggcggtacgatgggcaatctgttcggccagttcgggaccgggttctctaacgccgccacccagcccaatgcaagcgtgccaatgtttgaaaccaacctgcccggtccgtcgaacggttgggtccagcccgtaccatcacacacccagaacggccctagtcagccgcagccgcagcaacagaacccgttcaacttgctcaactttggcacgctcccactcgcaaccggcgatccactaatggcgatgagcacggcaaacacgaacaaccagccgaacgtgggcccaccctcgctggggtccgacttttacatgaacctcgatctggccaacctcgatccggtgttcaactcgtccgagttacgctccgtactggggtcactttccacgaccgacctaaaccggctcgagcagacggcgaacatgcagacgtccggtgggaattaccaacaacattcggcctcgaaccagcagcaagcaataaaggctctcttagcgacacagcagttacaacagcagcagcagcaacagcagcagcagcagcaacaacaacagcaaggacaaaccggccaagccgaccggatcgacaacgacgaggacctgaccgatagctttacgaaactcagcacaaacgatttaaactagattcaaaaacggtgatccgggacggtggtgacaagcgatagtgacacaacggaaaacacccatactcacacgatcattaggattgcacccaagcaccactgtcaccattttcccgtaacgttagcccgtaagcatccattccaacccccctccaatgcgctgtgttttgacgacatgttgtcttagttgagttgttaagttttgctctgtaacacattttttttttgtttaccaacagaccattggcaagtaaaaccaagattcgagatttttgttttacct

SEQ ID NO: 66 - DNA, 180 bp, Aedes aegypti
atgaacttcacaaagttatttctcctgatcgccgtggctgttcttctcctgaccgggcagtctgaagcaggtggcctcaagaagctgggaaagaaattgggaggtgcaggaaaacgagttttcaatgctgccgagaaggctcttcctgttgtagctggggctaaagctctaggaaagtag

SEQ ID NO: 67 - DNA, 258 bp, Aedes aegypti
atgaagcagcaaacagtgtgtattttgctggcacttgttctagtatcagctgcctataccgatgctttggtgtttgtttatgccaaaacctgttcctcttgcaaggcatatggagcccggtattgcggctatggctcccttaactccaaaggctacgtttcctgtgacggagcgacgtcaataagaagctgcagtgactgtcagaagcggttcggaagatgccgtgaaggtgccatcaccgaatgctacatcggatga

SEQ ID NO: 68 - DNA, 398 bp, Culex quinquefasciatus
atgaacaccgagccgggtcggggatccacagacgatgaagagccgcaactgtctgcgacctcggcgaaaacctgctccacatgccggtccctgggagcaaggaactgcggatatggttccctgggctcaaaaaaatacgtttcctgcgacggtgcgacggcgataagaaactgtgacgactgcaggagacggtttgggacgtgccaggatcgttacattaccgagtgcttcattgggtgagaagttgcacgagagctcagcgaggattttctgggaaccgaactggatgtgatataaagatagcaacttagtttgtagaatgatggacagttccaatttgaacgatgagcaaataaagtaaaatatgtattttttaatagtaaagatcgatccaaaaa

SEQ ID NO: 69 - DNA, 648 bp, Anopheles gambiae
gtcagtgtgctgccagggtttgattcgatccagtgcgatccagagctgaacgccgtcacaagtgcctaaagtgtagcaaacatgaagcaggtgtgcattcttctggcagtgctgctgtgcacggcagccgttgcggatgcaatggtgtttgcttacgcgccgacttgtgcgagatgtaaaagcatcggggcacgctactgtggctacggctatctcaaccggaagggcgtttcgtgcgacggacagacgaccatcaatagctgtgaggactgcaagcgaaagtttggccgctgttcagacggctttattacagaatgtttcttctgagtggagctctgctggaaccatcatcggcaggaccgtcggtgcgtcttgtgcagggtgttgtgcgagcgcggatgcatttgaaatgatttgtcaggatttgtcttgtctaattaatgcagtgcggtgcagtttacgagataagcggtttattactcaagcggtttaatcagtgccagacgttggtcaaatgaaaattgcagttgaaattactcaaacatttaagcgaacttttatagtaaaataaacggaaggaaaatttacaacagaaatcaatgcttgtattattcgtaaataaaataaatccttttcaatattttccat

SEQ ID NO: 70 - DNA, 447 bp, Aedes aegypti
atgagaaacttgaatttattgattgtactggtgggtctttttgccctgttgagtgtaaacgttgaggccaaaaagttcgacaagtgttcgctggccaaagctctactcgcgcaaggattcaacaaagccgatctccgaaactgggtatgcctggtgcagaatgaaagcggtatggataccaacaagaagaacaacaatcgcaatgggtccaccgattggggcctgttccagatcaacgatcgatactggtgcgatccacaggacaagaagaaaaagacttcgaacgagtgcaagattaagtgttctgaacttctaaaagacgacatcagtaaggcttcagcgtgtgtgaaaaagatctacaagcgacacggctacagagcctggtatggatggctcaatcgctgtgaaggcaaagcgcttcccgatttgagcaaatgtaaactgtaa

SEQ ID NO: 71 - DNA, 435 bp, Aedes aegypti
atgaagcaaattgccatcattgtcacgatagcaatcgcttgcggtttgtttggtttcggtgaaactaaaactttctcagaatgcgagttggctaaacttttacacagaacttacaactttgataagaacaaggtgaacaattttgtatgtctagcacaggctgaaagctcgcttaccacaagcaaaacccacaagaacagcaatggatccaccgattatgggctattccaaatcaacaataagtactggtgctcatctgctggatttacctcaggaaatgaatgcaaagtctcatgtgctgacctgatgactaacgatatcactaaagcagtcaattgtgcgaataaagtatttgcacggcacggatacaacgcttggtatggttggaagtctaaatgttcaaaaggagtgaaagatctttcatattgcatgtaa

SEQ ID NO: 72 - DNA, 441 bp, Aedes aegypti
atggtcagtcccagccaaaatatcctgtacgtggcaagcgtactcctagttctgttagccacattcagcgaagccaaagttttcaaaaaatgtgacctggccaaggaactgggcaagaacggaatttcccgcacattccacggcaactggatatgtctggccaacgccgaaagcggtttggataccaccaaggtgacgcagatgccgaacctgactgccagttacggaatcttccaaatcaacagcaaacagtggtgccgatcgggacggaaaggtggcgtgtgcaatatgaagtgtgaagattttctggatgacaacatcaccaacgacatcgagtgcgtcaaaatcatccagagtcggttaggattcaacggctggcctgtttgggtgaaaaagtgcaagggcaaggaactgcccaacatttccaactgttacatttag

SEQ ID NO: 73 - DNA, 2649 bp, Aedes aegypti
atgacgcgatcgatcgtcatcaccgtggctgtctttatcctgctgacgaatgatcgagccggtgcaagaatctacaagagatgcgagttggcacgtgagctggctcttaaacaggtgccggaagatgaaatcggtgattggttgtgtatcgctgaacatggatcacggttcaacagctcggctatcaatctcaagtacaaaccattcggtggatcggcatactatggaatctttcaaataagtgatcagtatggctgtctgaagagcagttcaatatgcggactaatttgtgctgatctgaaggacgatgaagtggaagatgatattgattgcatgaggaaaatctacggcgagtacagccgagagatcggagatgggttcgcggcttggccagtctacaaaaaacattgccgtaatccggcgagtttcgtacctttcaaagagtgtttgaacgacgaaatcatgagattccaagcgtattataaaaagaagagggcgaaagctaagaaggtggaattagaaccgaaagttgaagtcggaaaagtatacgaacggtgtgagcttgctaatgaattacgtgacaaataccagatggaaccggagcatatctcgacgtgggtttgcatagcgtaccacgaaagtcgcttcaacacttccgctgaaggtcgattgaacgcggatggaagcggtgatcatggtctgtttcaaatcagtgatatctattggtgctctacggggagttctccgggcaaagcatgtggcgtgacttgtgaagatatgcgcaacaatgacatcagtgacgacatccggtgcattaaaacaatattcgatgaacatcgaagaatctccggaaacggattcaacgcgtggtcagtgtacaaaccttactgtcagggtagggaagaaagctttgtacacaactgcttcgactcgactaaaccgacaactgttattcgcccacgacctggcataacggcaccaactccacccaaaaccaaatcttcaatcgtctcaattggtaaaatctacgatcgatgcgaacttgcaaatgatcttctgcacaagttcaagttcccgaaagaacaaatctttgacgaacatcagagattgtctggagatggtttcaatgcgtggtcggtctacaagccatactgtcagggaaaagccgacatctatgcgaagggatgctttggatccgatgatgatcatgccgttacagccgcattgcctaaacctgccatcacagctccaactcatgctccgtctagaaagataggagtaagtcgtgggaaagtgtacaatcgatgtgaacttgctagggaattgcattacaaacatcaacttcctatagaggtttctgcaatgtggacctgcatcgctcagtatcagtcgaacttcaacacttctgccgtaggttatggaggcggagacgtgcagtatcatggaatgtttcagctcagtgacgaatattggtgctcacctccgggccgtggttgggtttgtggactaccgtgctcggatttggaggacgatgatattagtgatgatcttgcgtgtatgaagcacatctacgacgagcatcagaggatttctggggatggcttcaatgcgtgggctgtctaccagccgtactgcaaaggaaatgcacaaaacatgatcaagggatgttttgaggaaggagaaaatgcaatcattccaacaacgaccatgcgagtaccacatagaaagcaaaatgtcggagttggaaagatctatgaacgttgtgaactggctcgtgaattgtatcatgtgcatcagctgccatttgaacaaattgctacctgggtctgtatagctcatcgagaatcaaattacaacgtttcagctattggtagacttaacgccgacggaagtgaagatcatggactgttccagataactgacatttattggtgctcaccgccaggaaaaggctgggtttgtggaatagcttgttcagaccttgaagataacgaccttagtgacgatgtggagtgtatgaaaaagattcacgaagaacacacaagactctcgggagatgggttcactgcgtgggctgtttataggccttactgtcaaggacgatccgatcattacataaaaggatgctttgacgaaacttcaacgattccatcaacgactacaacaaaatccacatctaaactgacaactccaagattagcaagcaccaccaagcgatcaacgtattcatggctcccaacaaccacaagcaaaactacagcagcttcaacaagcaatactttttggacttcaacctctacaaaatcaacactgccatcaacgacaagcgcccgcccaacaactacccctcgattccaattcgggtcaacaaagtcaacgaccagtttgtacgacttctacctgaaccatttcggccgtccaaacacaactccggcgtcgtttgctgcctttactgtcagaccgcccaattcaccaaaacctgccatatcaacaaccgctgcccgactcaccgcgtggcagtctccaagtgatcgcaccacaatgcgatcttctgctgtcaccgtagcgccattttccaccaccagcaccaagtattcacgatttgatcaactgtttgataattttagacacggaattttgaataaatga

SEQ ID NO: 74 - DNA, 447 bp, Aedes aegypti
atgggaaacgcaaagttgccgatcgtactggtaggactttttgtcctactggcatccacaatcgaagcaaaaaagttcgacaaatgttcgctggccaaggctttgctggctcaaggattcagcaaagcagatctacgtaactgggtctgtctggtgcagaatgaaagcagcatggacaccaacaagaagcacaacaacagcaatggatccaccgattggggcctgttccagatcaacgatcgatactggtgcgatccacaggacaagaagaaaaagacctcgaacgagtgtaaggtcaaatgttcggaattcctgaaaagtgacatcagcaaggcttccacatgtgcgaaaaaaatctacaaacgacacggttttagcgcctggtacggatggacaaacaaatgtaaaggcaaagttcttcccgatttgagcaagtgcaaactgtga

SEQ ID NO: 75 - DNA, 441 bp, Aedes aegypti
atggtcagtcccagccaaaatatcctgtacgcggcaagcgtactcctagttctgttaccggcattcagcgaagccaaagttttcaaaaaatgtgacctggccaaggaactgggcaagaacggaatttcccgcacattccacggcaactggatatgtctggccaacgccgaaagcggtttggataccaccaagatgacgcagatgccgaacctgactgccagttacggaatcttccaaatcaacagcaaacagtggtgccgatcgggacggaaaggtggcgtgtgcaatatgaagtgtgaagattttctggatgacaacatcaccaacgacatcgagtgcgtcaaaatcatccagagtcggttgggattcaacggctggcccgtttgggtgaaaaagtgcaagggcaaggaactgcccaacatttccaactgttacatttag

SEQ ID NO: 76 - DNA, 439 bp, Culex quinquefasciatus
gcaaaaaagttcgacaagtgttcactggcgaaagctctgcaggataatggtttcagcaaagacagtttaccaaattgggtctgcctgattcagaacgaaagcgcaatggataccaccaagaagaacaacaaccgaaatggttcaaccgactggggactgttccagatcaatgaccgatactggtgcgatccccaggacaaatccaagaagacctcaaacgagtgcaagctcaagtgttcagctttactatcggataacatctcgtcggcggcgacctgcgcgaagaaaatctggaaacgacacggttacagggcctggtacgggtggatcaaccggtgcgagggtaaaacgctgcccagtctgacaagctgcaagttgtgaattccaatacagacttatttggcggaaccagtaaaactaatatagaaatatctaaaaa

SEQ ID NO: 77 - DNA, 505 bp, Culex quinquefasciatus
atggctgttttgcagaagatttttgcccttggggtggtaattttggtcgtgagttcagttggtgaagcaaaaaagttcgacaagtgttcactggcgaaagctctgcaggataatggtttcagcaaagacagtttaccaaattgggtctgcctgattcagaacgaaagcgcaatggataccaccaagaagaacaacaaccgaaatggttcaaccgactggggactgttccagatcaatgaccgatactggtgcgatccccaggacaaatccaagaagacctcaaacgagtgcaagctcaagtgttcagctttactatcggataacatctcgtcggcggcgacctgcgcgaagaaaatctggaaacgacacggttacagggcctggtacgggtggatcaaccggtgcgagggtaaaacgctgcccagtctgacaagctgcaagttgtgaattccaatacagacttatttggcggaaccagtaaaactaatatagaaatatctaaaaa

SEQ ID NO: 78 - DNA, 2568 bp, Culex quinquefasciatus
atgaaatttgtgattacggtgttgatcctcgtgttgtcctgcgatcaacagcgcggagttggcgcaaagttgtacaagagatgcgagttggcgcgagagttggccctcaagcagttgccggaagaacaaatcggtgactggctgtgcatcgctgagcacggggccagattcaacagttcggctgtcaatctcaagtacaaacgtttcggtggctcagcgtactatgggatctttcaaatcagtgatctttacggctgcctaaagagtagttccatatgcggactgacctgtgctgacctgcaggacgacgaggtagaagacgatattgactgcgcgcggcagattcacagagagtacaatcgagagatcggagacggtttcgcagcatggccagtgtacaagactcattgtcagcatctcgcgatcaaggctgattttagtgactgtttaaacgaagaggtcattcgcttccagcggtattacaagaagaagaaggctaaggctaagaaagccgaacttgagccgagtgttcccgtgggtaaagtgtacgaacgttgtgagctggctgttgagcttcgggacaagtttaagctgccacaggatcagattgcaacgtgggtttgcatcgcgtatcacgagagtcgtttcaacacctctgcagagggtcgactgaacgcggatggtagtggcgatcatgggctgttccagatcagtgacatctattggtgctcgtattcgagccaaccaggcaaagcatgtggtgtaacgtgcgaggacatgaaaaacagtgacatcagcgatgatatccgttgcattcagatcatcttcgacgaacatcgtaggatttccggaaatgggttcaacgcgtggtcggtgtacaagccgtactgtcaaggcagagaagaaagctttattcacaactgcttcgacgaatcagtaccatcaacttcgatccgtcctcggcctggcataactgcaccgactcaacctgggaaaaagtctgctctcacggtggcaccaccaattggtaaagtgtacgatcgttgcgagttggccaacgatctgctgcacaagttcaacttcccaagggagcaagtggccacgtgggaacatcagcggctttccggagacggatttaacgcatggtcagtgtacaaaccgtactgccagggcatgtcggaaagctttacccgagggtgcttcggatcggatgatgatcaaccagtcaccgctggactaccaaaacctgccataacagcgccgacgcgcattcctccaagaaagaccgcgtcgtctagaggaaaggtctacaaccgttgcgagctggctagggaactttacttccagcatcactactcatacgaggatgccgccatgtggacttgtatagcccaatatcagtcgaactacaacactgccgccgtcggcaccggtgccggagatgttcggtaccacggaatgttccagcttagtgatgagtactggtgttcaccacccggcaagggttgggtctgtggattaccctgttacgatctagaggatgacgacatcacagacgatcttgcctgcatgcgacacatttacgaagagcatcaacgaatctccggagatggatttaacgcgtgggcggtttatcaaccgtactgcaagggaaaggctttggacatggtgaagggatgctttgaggagggtgaaaatgccgttgtccctacgaccacaacgaggagacctcctacgaaaaagaagaacgttggagttggtaaaatctacagccgatgcgagttggctcaggagttatactacaagcacaatctgccatttgaacagatagcgacttgggtgtgtatcgcgcatagagagtcaaactataacgtgtcagcaattggacgtctgaatgcggacggaagcgaagatcatggtctgttccaaatcagcgatatctactggtgttccccacctggcaaggggtgggtctgtggactgtcgtgttcagatctcgaggataacgacctgacggatgatgtggaatgtatgaaaacgatatacgaagagcacactcggctgtccggcgatggattcacggcttgggcagtgtatcgtccttattgtcagggaagatcagaccattacatcaatggatgtttcgatgccgatcccacaacaaccacagttctaccaagtacaacaaagcgattctcgagtacaactcagagaacaactcgttggagtcccatcacgagcaaaacaacactgctaccaacaacatcaccgacaacacaacgtccaaccatatcgacaaccactgcccgttccgccatcaaatcaaccacgagtttgttcgacttttacctgaaccagtttggccgtccaaacacgacaccggcgaccttcagaccgttcagaacgacttctatttcccctgttcgcaccccgtggtcgtcttcgtcaacggtggcacgtgactttacgccggggacactttccacggccagcagaacgacaacgttgccacccaccaccaagtattcaaactttgatcaactgttcgctaaccttaagcatggctaa

SEQ ID NO: 79 - DNA, 522 bp, Culex quinquefasciatus
tcgttcaagatgacctacccgaataagttaatcagtctcgttctgatcgcgctgatcacactcgactcaactcaggccaaagtgttccagaagtgtcccctggctaagctgctggatagcaatcagatatcgcgaacgctgatctccaactggatctgtctgatacaagcggagagtggggcggacacttcgaagaagacctcgcttgacaacctctcagccagctacggaatctttcagatcaacagcaaggagtggtgccgcgtgggaagaaaaggtgggaagtgcaataaagattgtgaagactacctcacggacgatatcaccgatgatatcgagtgtgccaagcagatctaccgcgatcacggattttcgtactggaagggctggacgaccaagtgcaagcagaacaaacgactgccggacatttccggttgttggaattgatgacgcagtggtggaatgatgagtgattatattttttaacacgaataaagaattgttgttggggtaaaaccatag

SEQ ID NO: 80 - DNA, 929 bp, Culex quinquefasciatus
ctttcgatcggatcggcagctatagtacaagcgcgtgtcgtccaccacgcggccgccgtaattagggcccctccaagtcgatggcaaacactcgtcgggtcaactcgccggacagagagaaaagcgtatttgcagatcgataaagtacaaacattgtggattcgataaccacctggagactgcaataagaagccgggtagatcgaagaactgaacgctgaagagctgtgatctccgaagaagtcgagtcgaggttcgaatccgctgttccagaactttcaactagactacgtacccaaagtgccgaagggaaatccatttgctcagataaccacaatacaaaaacaatgacatccacaaccaacctgaaccgcaccttcgccaccctgttgttggtggtcctcgttgccgccagcaccctgttcagcggcacctcggccaaagtcttcaccaagtgcgaactggccaaggagctgggcaagaatggcatctcgcgcaccttctacggccactggatctgcctggcgaacgccgaaagtggcctcaacacgaccaaggtcacaaagctggccaacatgagtgccagctacggcatcttccagatcaacagcaaggagtggtgccgggagggccgcaagggtggcaagtgcaacatgaagtgcgaggatttcatcaacgataacatcactgacgacattgagtgcgtgaagaagatccagatgcagtacggtttcaacgggtggaacttgtggcagaaaaagtgcaagggcaaagaactgcccaacatttccaagtgtaacgtttaagggggaaaccaagtgcaatatatcagtcaagtgaaacgtgctcaaaaagacacaaatgtacaatatgtgataacgattaattcctaaaaataaaacgcattttattagccagttttaaaacaaa

SEQ ID NO: 81 - DNA, 571 bp, Anopheles gambiae
aatcattcccagttctagttgttcattcagagatacgtacgccaaagcgaatcttcgaagatgaaagtgttttccacagttttgctcgccatcgtcgcgtgttgtgccgtagccgaagctaaaacgttcggcaaatgtgaactggcaaaggcgctggccaacaatggtatcgcgaaagcatcgttgccggattgggtctgtctggtgcagaacgagagtgcgttcagcacatcggcgacaaacaagaacaagaacggttcgaccgattacggcatcttccagatcaacaacaagtactggtgcgattcgggctacggttcaaacgactgcaagatcgcgtgcaaaaatttactaaacgacgatattacggatgacatcaagtgtgccaagctgatccacaaacgtcatggatttaacgcctggtacggctggaagaaccactgcaatggcaagaagctgccgaatgttagctcctgtttttaaggacgcttttgtttcagtattttaaaatgtagtagtaatgcaaaatcattagtcgagtaaataagataaccaccaagatgtataacaa

SEQ ID NO: 82 - DNA, 2765 bp, Anopheles gambiae
gattgactgcgtctccggagtgtctgtctggtttgtgtgtgtgtgcctggcatgtgtctgtgtttgtgatgctgtgggtaaagtaatagcccccgctaggatatgatgccgcacgtcctgatcgtcgtgctgagcgtgatcgtgagcatcgcggcgggcagcgtgcgccactggacgcgctgtgaagtggcccgcgagctagcgctcaagcacgtcccggaagagcagatcgccgattggctgtgcattgccgagcagggtgcgtcgtacaacgggtcggccgtgaacgcgcggttcaaacattacggtggcagtggctattacgggctgttccagctcatcgaccggtacgcttgcgcccgatacggttcgatctgtggactggcgacgtgcaacctgctgctcgatgacgagctggacgatgacattgagtgtatgctgaaggtccatgcggcttacgtgcgggagctgggcgatggtttcgctgcgtggccgatccacgcaacggcatgccgcggggttcggaagatcccgttcgaggactgtcttgatgaggaggttgtgcgggtgcaggagtactttaagcgcaagcgcgcgaaggcaaaaaaggcgaaccttgtgcaggcgacagtcgggaaggtgtacgaacggtgcgagctggcgatggagctacgcgatcgacatcgaatgccgatagagcagatcgcaacctgggtgtgcattgcgtaccacgagagtcggttcaatacatccgcagaggggcgtctcaatgcggacggaagtggcgatcatgggctgtttcagatcagtgacatctactggtgctcgcaggatgaccgtcggccgggcaaagcgtgtcgcgttacttgtgccgccatgagggacgatgacattgctgatgatgtgcggtgcgttaggacgatctacgacgagcatcagcgcatttcgggcaatggatttcacgcctggaccgtgtaccgaccgtactgcgagggacgggaagcaagcttcgtgcacaactgtttcgaaggggaaacgcatccaacgacgcagaataaaccaaggcccgggattgttgctcccacgaccattccgactgtcccgaagaagagtttggcggaggttggcaaggtgtacgatcgctgtgagctggcgaatgatttgctgcacaagttccatctgccgaaggagcaggtcgctacgtgggtgtgcattgcttaccatgagagtcggttcaatacgtcagctgagggacgtctcaatgcggacggaagtggcgatcatgggctgttccagattagtgatatctattggtgctctccaccgggtaatgggtgggcttgtggagtgagttgcgatgcgttgaaggattctgacatcagtgacgatgtgcaatgcgtaaaaacgatctacgaagagcatcagagactgtctggggatgggtttaatgcctggtcagtgtacaagccctactgtcagcgtgatgcggtggatacgttcgttcgtggttgctttggagaagaggtggacattgcccatccagtgacggtcccgcgacctgccatcacagcaccaacgagagtgccccagacacgcacgtcccccggcaaagtgtttgaacgctgcgaactagcccaagagcttcaccgacagggtctttccctggagcaaaccgcaatctgggtgtgcatcgccaagtatcaatcaaacttcaacagttccgcgctcgggtacggcccaaacggtgtgcagtaccacggcatgtttcagctgagcgacgagtactggtgctcgccgcccggtcgcggttgggtttgtggcatcagctgcgcccagctgcgggacgccgaccttagcgacgatcttggctgcatgcagttcatcttcgaggagcatgcgcgcatttccggcgatggttacaacgcctgggcggtgtaccaaccgtactgccgggggaaaagcgccaccatgatcgatgggtgcttcgaggagggtgaaaatgcgatcgttcccacaccaccgaccacgaggcgtccgatcgcgccgccgaagaatttcccccgcggcaaggtgtacgagcggtgcgagctggcacgggagctgtactatcggcacgggctgccgtacgaccagatcgccacgtgggtttgcatcgctcaccgggagtcgagctacaatgtgtcggcgatcgggcggctgaacgcggacggcagtgaggatcacgggctgtttcagatcagcgacatctactggtgctcgccccccgggaagggttgggtctgcgggctgtcctgtgccgatctggaggataacgatctgacggatgacgtggagtgcatgaagacgatctacgaggagcacacacggctgtcgggcgatgggtttaacgcttgggccgtgtaccggccgtactgcaagggacgagcggaccgcctgtacgagttctatctgaacaacttcggccgccgtcccgccgtcagcaccgccgcgccggtgtacacgttcaaaccgttcgcttcccggctgcgggcaaccgaaagcactgccaccgaaagctcgtcaacgctgtccaccgtcaccaccacactgccaccggtcgtgaccactgcaaggtttagtgactttaatcgctggtttcaggccggttaaacgaaaatggagaatttgaaacgatcgtcccaaattagactctaaatgcgtctgttcggtagcaccttttaaaaagataaataaatctccgctcgtttttatttgttgctttctat

SEQ ID NO: 83 - DNA, 1053 bp, Anopheles gambiae
ctccctcggaggaggtacgtaccagaaaggcacacaacgagggagcatgttggtgccgactctacgcgcctaaacgtcgagctcgcgcgcacgttagatctgacgtcgttccacaaccaacacactcccgctctcaaaaagaacaaaaaaataacacgatccagattgttcaaacaccctcttatacctgtgtgtagttcccactcgaaaacgcgggccgctgtcactgtcaagtgtacagccgtgtgtgcgtgtgtcgctattacaatataaaacgcctgtctgcgcaacacggttcgcgcaagtagctacgggcccgggtactagtgacaaaccggaaatcacgcatcgctgcgcgtaccgttcggtgtacgcagtggccgaacagaacggaatcacttgattgacggcgacaccagtgtccagatttaggtgttgagcgaaattgcccaaaaactcaacgatggcagccaagcgtgtttctgtgcgtcagacactctcgttggctatcgttagcctgtgccttctgggcctgccgagcctgatcgatgcaaagatctacacaaagtgtgagcttgccaagcagctgaccgcgaacgggattagccggacgtatcaggggcactgggtctgtctggcgatcgctgtcagcgggctggataccaccaaaaccaccatgctgcccaacctgaccgccaactatggaatcttccagatcaacagcaaggagtggtgccgcgtaggctacaagggcggcaaatgtaacatgaagtgtgaagatcttgtgacggatgacattaccaatgcaattaagtgttccaaaatcattcaacaacagaacggcttcaacgagtgggttatgtggcagaagaagtgcaagggcaaagagctgccagacatcgccaactgtgcggcaattggttaagatggggtaaagccatcgaataagcgaacaaacgggaaatatccagtaaactattacaacacgcacctttacaaccgaaccatccaaatgaaacttaaaccacaatttgtaaacaataaaatgaaagt

SEQ ID NO: 84 - DNA, 765 bp, Anopheles gambiae
cataaatccacatggaactgtattttgtggcagtctggctgacagttttgagaacaaatagttgaaaactttgcaccaaatttgatctgcgaagtatagttgcagtaagaaaagtgatataaaaactggagctaccatcagaaagcaaatcagttttgtgttgcagttcttcagcaagtgttttacaatgaagtttgctttcgcagttttgatcgccatcgctgcgagctgttccgttggtgaggctaaaacgtttaccaagtgtgagctggtcaaagcgatgtataacaggggtatttcgaagaaattgttgccggattgggcctgtctcgtgcagtgggaaagctcatacagtaccacggcgactcacaaaaacaccgacggttcgaccgactatggcatctttcagatcaataacgcatactggtgtgactcgcactacggatccaatttgtgcaatataccgtgccaaaatctgctgaccgacgatatctcagaagacattaagtgtgccaagatggtttacagccaccatggattcaacgcttggtacgggtgggtggaccactgcagaggaaaagcattgcctgacatccgcgagtgcttctagtgcgcgttcttgtccaccctacccggtacaagtgcattgctgtagcctgtcgtcatcggttgttgtaaaaccatgcggcaatgaccagccatcacattgagcgatacattcttaactacacccccggttggaaataataacaatttgcgcaaatc

SEQ ID NO: 85 - DNA, 602 bp, Anopheles gambiae
agtctcgctgtgtacttcgaagacggtgaatcgggtaacgcgcgtgcagttaaaatacaccgcaacctaatcatgatgcgtggaatacgtcacaacttcagatcagcgtctgctatcagttttgtggtgctaattttgtttacactctatcacactggcgagggaaaggtgtatgaaaagtgttcgcttgctagaacgtttgatcgacagaagatctcctcgcggacgctgatatccaattgggtctgtctggtgatggccgaaagcggtgccgacaccagcaaggtgaccaaactcccaaatgattccgccaactatggtatctttcagatcaatagcaaaacctggtgccgggagggtcgtaagggaggccactgcgacaagaagtgcgaggactttctgaacgacgatctcacggacgatatcgagtgtgcgaagcagatctacaacgacagtgggtttgccgcttggaaaggatgggttaaccgctgcaagcaaaagacactgcccgatctgtcgtcctgctggaactaggaacttctataacacacactttacatgacattattggtaataaaactatttgatttcatcccaccaaa

SEQ ID NO: 86 - DNA, 3432 bp, Aedes aegypti
atggtacagagacaagtattattatatttaacattacagtgttgtatctattcgatacttggattgggatgggttctgccggagaaacccatcgtgcggttagtaaatcaatcctacgacataacatgcacattgaatcggtcagatccagataccgaaaagttcaccagcaatgatcttatgttttacataatgaacgacacaactacacaacacaaacatatgcagcacgaacacatgcagcgggaacatgtgaagattgtaaatgagacaactattcagctaagcgtccataatgcatcagcgggaaagttccaatgtatatgtaagctaaaccacacaaagggtgtcggtatgcgaagcgtttacgttggctataaaccgtataatgtgactaactttaaatgtcgttcggaaaactggcaaaatatgaactgttcgttcatacaaaagcaaaatccgattcccaccgattacaagctcaacttcaaatttgatcgggaaacatcatttgtagactacaattgtccattggaagggaaatccgactcgtggtcatgtctgatcgatttggaatcgtcgtatcggcagtcctatgaattttattattttgtattagtgtcgaacaacacactggggcgcaacgtcgaatatttcaccatcaataactacgacaatgtcataccggaagcgcccatggtatgccaagccactaatatcacgtccaaaagtgcaattctgcattgggcaatctcgtacaagttgcagaccttcaaacgggacttcattttccaaatcaaaattctttcgagtttcgataactcaatttggaagcctatcagcattaccaatattgccaagtcgttgacgaactacacactcccaatagaggatttggaatttgccgatacgacttatgatgtcaggataaggatgcaaactgcaacggcggaaaataccgaggaaatgtggtcaaactactccagctgtttgtttaagacattacctcgaagaccggacaatcccccagaggtcgtcattggaggcttcgaaatcaacgcgtacaacgacatattcgtgtactggagggaaattcctaggagtaagcacaattcggcgaccggttttcgttacaaaatatctgaaatcactaggaatggaatcccaatcagtaatatcaccgaaggtcgaaatggaagctctatgattcagttcaggaatatgactgacggcaactacacattcgtcatacgaagttccaacagcgagggagattcgctaggtgcaagtcatctttttattcctgctcggagatatcgtgctccgaaacccgaaataacgaagctactctcggatgctggcaaatatctgctatcctggaaactggtcccggattacgcatccagaattacttcctacaccgtattttggtgtaattctagtagtaattcgcccaacgattgcaatggttccataaactttgatgaaatcgacaatactagagacagctatgaactgaacaacgttagctcgacgttaaattttgctgtcgctgccaatgccggtaatctgtcttcgggcatggtgtgggcgtcgtgtacagccacccagaaaaacgacatcggcaagctgaaaaccatctggatccccgctatgcagtcaacctacatcgatctggagtggaaactagaatgtggagatagtgcaatcgttgagggttacagtatcatttactgtcccatcagttcaccgcgggatcaaagctgcaaagtcccggaagaatcgcttaacattacgggaaccacatcacatcgcataactggactgaaaccgtacgtcacgtacaaaattcaaatagcgatgtattcgaagactcgcataggaccccggagcgatccgctgttcaacacaacgcttgaagatgcaccatctccaccacgaaacttgatgctgaaagatgttcgtaacgactcggtcattctgcactgggatccaccgttgcaaataaacggtggcaaaatgaactacgaagtctggtacaatcatcagcataagaaaattgatcccgaaaactataccgatcatgttacgtacaatctcaccggtctggagccgttcaccaattacaagatcatcgttcgagcctacacgattgcttattctaacaattccaattcagttgatgtgacaacggagattggaactccaggaatcatgcaacagccgggctcggtagattcgaatagtaccaggttatcgattatatggcaaccaccggagaagaaagccggctgtatggaatactatgagcttaaaattaaaacaaatacccagacggaggagtcggctataataatgcgcgtatctggtacaagatgtaccttaaaacgtacgatctgcttggggtcggcagactccaataggaccgacaagtacgagttctcagtacgagctgtaaatgtcattttgagtccccatgcgcctaactataccgaatggaacagactggcatgtgatcaaaagtattcttattacttgaatcatggagtgcctaacacgtataactatcactcacatcctagtggattagaatgcgagcttaatggacatagtgttcctttcatagactggatgaaaatagatcaatatgctactattttacacggcgaatggtcatggccactgacgcattggtgcaattacggcccgagtaatacggaggccattatctttctatcgtttgtcacgtgtttgggaatcataagtcttcttatctgcacctacatgagcttgaagaaaatgaagcaaatcaaaaacataaaggttgtgctaccagatgctttgaatgacattgtggcatcggataagcccgatgtattcaaagagagcaatgacagctatgtgaatggatactcggataagaatgccggcgatacgttgctctcgtactcgcccagccatcgatatgtgaagaacaatttggatgattccaccagtattggttcaaatgacgagaacattgacaacgatgacggagtggtggatggcgaagtggatttattgtcactatcagatgatggaaaatcgcaacaatacttacctatggaacaggatttatgccaaccgtctgaaccgatcaatactgatataatagatataaggtctaatgttaataaggataatgttttaagtttgccgtcaacaggatacgttttagcacctgtagcaaaaccgagcacaaatggatatgtccaggcacctttagctaagcccgccgtcacgtccaattacattcagccaagtgcttttactggaatcaataatccgagcctctcgaaaacatcgatcattgtgtcaaccacagatgccgatggaatctctggatacgttactcataagcaactgtctgattatggtctgaaaatgcagtaa

SEQ ID NO: 87 - DNA, 3420 bp, Culex quinquefasciatus
atgcaagtgtatcgtgcatcgcttataccaactctgctgctgttctgtttggttcccgtgtggggcaccgaaataggatggatatcaccgacgggcaacatgaacgtgctggcgcatcgcccattcgtcgtcacctgcacaatgaaccgagggaacctgttgacgagaaattactccagcactgatttgtggttttataccaacgacgagccagtgcccacggagtcaataaaaatcgtcaatgataccagtattgaactgcatgtacaaaacgccatcgctggatcttataaattcgtctgtaaaatgaatgagtctactggtattggaatgaaaagtatcaacgttggctataaaccacagaaagttttgaatttcaaatgtcattcacataactggcaaagaatgaactgctcatttgagcaggcttacaacccaattgccacgagttatatgttgaaatttgggttcgaaaattctccaggcgattttcagtgtccactggaaaataagtacaaccacaaatgggaatgctctagagacatggacaattcctatcggcagtcgcaggagatatacaatttcgaattggaagccataaacgtcctcggaaatagcacggagagatttgtgatcaaccattatgataacgtgatcccggaggccccgtccgaatgtatggcttccaacattacgtccagaagtgcgttcctgcattggtcgatatcgtacaaactgcaaacatttaaaagagattttgtgtttcaaataaaaatcgtgtcgagtttcgataacaaaaactggaaaccagtggatgtgagcagggtttctcggaagctaacaaactattctttgccaatcgattcactagaatatgcagacacaaggtatgatgtgagaattcgtatgaaaacggcgacatcagaggataccgaggaaatgtggtcaaactactcaagttgtttgttcaacacattgccgagacgtcccgataatccaccggaagtggcgatcggaggattcgaaatcaacgcgtacaatgatgtctttgtgtactggaaggaaattccaaaaagcaagcacaattcggcgacaggattccagtacaagccagatatcaagagaaatgaattatctacaagtccagcaccagttgttggccggaatggaagcacgatgatccagtacaaaaatatgactgatggcaattatacattcatcattctaagttccaacagtgagggcgattcattcaaatccagcaagttgtttataccaagcaaagaatatcgaattgctaaaccagaaatcatcaaattgttggcagactctgggaaatatacgctatcgtggaaagcagcaccaaagcataacgcaagaataacttcatacacagtattttggtgtaactccagcagtaactctccgaacgattgcaatggatcaattaactttgactatgttgacggcgaccaacaaaattatgaactaaacaatgtgagctcaacactgaattttgctgtcgcggcaaatgttggagaactttcgtccggtatggtgtgggcatcgtgtacggcaacacagaagaatgatatcggcaaactgaaaaccatttggataccagctatgcagtcaacgtacatcgatctcgagtggaagctggaatgtggtgatagtgctatcgtcgaaggatacagtattatatactgcccgattaataatttacccagagagcaaacttgcaagggaaacgaaacaactcacaacataaccggtcagacatcttatcgcatcgagggattaaaaccatatgttacgtataaaatacaaattgcaatgttttccaaatcaagaatcggcccaagaagtgatccactttttaacacaacactggaagcagcaccatcagagccgcgtgatcttgtgttctcggaagtgcgaaatgattcggttgctcttcattggaaaccaccactacatatcaacggtggcaagatgaactatgaggtttggtacaacaaatcgaaaataaaggtgtacaccgagaactacacaagtgaccagacctacatcttgcgtggtttggagccgtttatgaattataaaataatcgttttggcatttaccattgggcaatcaaatgcatcaaattctgtggacatcctgaccgagattggaacgcccggtgagattcaacagcccggatcggaagattcgagcgattccaaattgtctattgtgtggcaacctccagagcgaagagctggttgtttggaatattacgagctgaaggtaaaaaccaacaccaacagtgatgatgccgcggccattacacgtatacaaggaacaagatgtcaactgaagcgatctatttgtcagcttgccggagccgattcacatcgagttgataaatacgaattctcagtacgtgccgttaacgtcattctgagtccgcatgctccaaattacacagtttggaataaattatcgtgcgataaaaagtattcgtactattctgatcagattgtacagaccctaaattcgtacaatacggcttcagatgacatcgaatgtgaactggatgacgatgaaattgccaacattgattggaccaaaatagacaaattcgcaacgttgctgtatggtgagtggtcaaggccgctagctcattggtgcaataactatggatcagaaaatactaaggcgatcgtgttcctaaccataattgcctgctctggtattattagtctaatcatttgtacctatttgagttataagaaaatgaagcagatcaaaaatatcaaagttgtattaccagatgcattgaatgacattgtcatatctgaaaaaggtgatgtttgcaaagaaaacggatcgtattatggccacgataattatggcgaatttgctggaaaaattcaagatgattctcatgttccgttcaccaacagtaacaggaatagtgagaaaaatattaacatgttagatgatacagccagtttgagctcagcagaagatcatcttgataacggtgtgattggagcaaacgaagctgatttactttcattgtctgacgattttaaatcacagtacagtttgcctatggacaacacagagtgtgttccggaacaaacgattattcccaaggcaactgttggtttgccatcgagcatgaaagttgagagcatgatgagtttctctccttcgggatatgttcaggcacctgttgcaaaaccgtccgcgaatggatacgtacaagcaccaatagcaaaacctccagcttcaaattatatccaaccgcacatgttcactgggaatgcaggtttagctaaaacaccgatcgttacttcaactgatgagagaggaatatctggttacgttacacacaaacagctctcggactatggccatagaatgtag

SEQ ID NO: 88 - DNA, 3297 bp, Anopheles gambiae
ataattccaacagaacccatttaccgggaggtaaatgattctttctcgctgcaatgtacgcttaacatgcgttccgcagaggcacgatggtcaaacagcagcaatctcatgtttttccaaggcgatgtgccagtaccgcgggaacaagtgaagatacttaatgattccaccattgagcttgtggtagagaaagcggatccgcacatgaactttgcatacacatgcaaagtcaacgatacgcagggtgtgggtatccgcagcgtctatattgggcataaaccgcgagaggtaaaggacttcaagtgtcgtgctccgctctgggataagcacatggagtgcaccttcacaccggaccccaattccatggctgcaacgtatgaattggtgttttattttaaaccaattatacaaaatttcacctgtaaactggagacagatgatcagacaaatcttacgaagtgcatcatcaacgtcgatacgggatatcgaaatgtcaacgaaaaatactattttattctgaccgcgtccaaccacctgggcacgctaagccaacgcttcattataaatcatttcgacgtggttattcctcatccgccgatcgggtgcgttatcgaggacgtaacgtcaaacagcgcagtacttaagtggagcaagtggtacaagtacgatgggttcagtcgaaattttatctgcgaagttaagctgctgtcaatttttgataataacgtatggcgcacagtaagcaacgagggattgcagctgaaccaccgggtgtatacactgcctttgcggaatttgccgtacgccgcgacaccgtacgacgtacgcattaggatgcgtaccaactcgacggagaccggtagtgatttgtggtcaaaccatacgagctgcctatttgacaccttgccccgcaaacctgatatgcctccggaagtggccatcggcgcctttgagaactcgaacgaacaccatctgttcatatactggcgtgagctggacgactggcagcataacgcacgcagtggattccactacaatatcactctgattgaccagcacggaagaattgtttgtttagggtcatcttgtgcccaatttttaaacccgtatattgacatgaattacacattcgtaataaaaagtgccaacccggaaggtatgtccgaacaagccagcaaggtgtttgttccagctcgtcgccatcgccttgacaagccttcaatcgacaagctgctgtcggattcgggcaaatttacgctgtcctggaaacctccttcaaggatccactctccaattacaagctacaccgtgttctggtgcaatacgactagcaactctccgaacgattgcaatggatccataaactttaccagtgttgccgccgaccagaccactttcgtgctgagcgatgttgggtctacgattaactttgcggtagcggctaacgctgggcgtgtgtcgtcggggatggtgtgggcagcgtgtacagctacgcacaaaaccgacattggcaaactgaaaactatctggatcagtgagatggattcgtcgcaaattcatctcaagtggaaaacggaatgcgttgatgtggcacatgtgggatacatgatctactactgttcgatctcgtctccacgtacgctcggctgcaaggaaccagagatgaagattaatgtgacggataagactctggaccactttctgttggaaaatctccatccatatgtgacatacaaaattgaaattgccatgtactccgatacgcacattgggccacgcagcgtgccgttagtaaatactactatggaagcagctccatcaccgccacgaaacttagtaacggaaagagtaacaaataacagtatatccctccactgggaacctccggcacacataaacggtggaaagatgttctactgggtgttttacaatggtcaatttttaaagcatgatgttgaggaaccgagtacaaatgttacatttacgctcgataatctggacgcattcactgagtacaatatcacggtcactgctgaaacggtgaaaccttcgaacagcactgaaccggtgcatgctcgaacgctggtagggaatccgttagtgatcggacagccgagtacgaacagctcgaacgattccaagctaacgattggatggaactcgccgtcgaaaccttctggctgtgtagagttttacgaattaaaggtgaaagccaatcagataattgtgtaccaacagcgcaagacggaatgtcaactgagggaaccaatatgccaaaatcgagacagctcaaagtacgagtttctggtgcgcgcagtaaacgttgacgttaccggtccgataaagactgctttcgaggagctgtcgtgcagtgatcgctggacggagctgaataatatgtggcccgagctaaaacgcttcgtagcgcacgcagaatgtggaacgagcgacgcgatagccatgcaatcgaacggatattcttggcttagtgaactaccacctaatattcgtctacactacggtccgtggtctgaaccgttggcacactggtgttcgatggagagtaagaacacgttggcaatttttttcctggtaggcattgcaattgccagcggtatagcgatgtttagttactcgtacgttaaggtgaagcatgttctgcaagtgaaggttatcataccagacggactgaatgatataacaggatccggcaaaccatccggttttggcgctgttattgggccagcgggtatcatctttacggaacatcaccgcgtcgatcacatcataacgggtggttccaccaaagaggccagttacagtaaggagcagaatcaatgtctgttaccgtcctcgtcctcctcgggtggtagtatagccgacctaagcagccatgagccacgatcttcggcagactattgtagcaacagtggatgctgtgaggacgacagtacaagcttttacgatcaggaagcagaaagacaagacctacacgggtacagtgacgatactacggaatctatagaaaatagccacgaagcgcaccagggcagtagtactagcagcagatcggcagcaaacgatgatttgggctcatcttttggacgcaccaatcttggaaccatgaatcatctgccaataatgcctgcaacatcgatggaaggcaagagtagtcagaacagatcatcatcggccatgccgattactgtcacttcaggctacgttccagcaccggtagttaatgtaagtagtgtagtgtgtatgcaaggtgttctagttgcatcagccgattcttga

SEQ ID NO: 89 - DNA, 3408 bp, Aedes aegypti
atgtcggagcatgagaacaaatatcaggtgtatatctatctgaaggaatgcttcatcgacgtcccggctcgggagggcgatacctgcgaggatctgtgcaccagtctctgccagcggtacggcattggtccgttggtgcagctgctgttgggccttcgaatacacgacgaaccatggttcctggcaccgagtgcccggccacaagccggcaaaaagtacgactttcgcgtacggttcaagattcccaagctttccaatctgaagacgctggatcgggccctgttcaactactactactaccagctgcggcacgatctcttgcagagcaagatcggcgaaatcgagaacgacgagtacaagaacaaaatcctgggctacgtcgtcaacgacatgtaccgcaagatggtcgaggatggcgtcagcgtaaccgagctgcagcgcacctacaaggagtacatcccgcggaagatcagcaaggagcactcgtttctgttcttcaacccggcccggaacaaggtgctggactcgttgaagcagatctgccgcaaagaccacgacgtggactatgtaaaaagtgtgtatataaacgatatcgataacattgcgccctgctatctgtacgaggaatacgactgcagcataccgtatccgcgggacgatggcataacaaagccgggaaagtgtaaggtcaaggtgaaattcgtaccctacgcacgcagccggaccgtgggcaaaaacgcgcaaaaggacgacagcgaatcgctgccaggactgaaggtgctatattcgcaagagtggaggcacgtagcgaatatcgatgaaatttttactatactagtacgcaaccaactaacggtggacatttcactgaaggatcagcagaatctgtactcgatagactttagcagtcagactgaattagaatcgttcgtaacgtgtttagctggttattataggttaatgtgtaagtggactgtgtatctttgtaaaccccatctgtcctcaccaacattgaataggctaacggaacttaaatgccatggtcctatcggaggaaagtactcctaccggaaaataacggagaagaatagcagtgtcggggctaatattgttcgtcaatgcgaaaaccactacgacacgtactacgtggacattttagagcgcgagaaccaaatgaaaacttataagctcacctacctggagaatcgttggcatgtgcatcgtgcaccgggcgaagtaacagcgtacgacgaactgctcgacgccctgcgcaatttgaatcccaagatcaagaatctgtaccggttgtcgccgacggagcacgacaaggcgccgaatctcctgctgtgccagccagagaacgacatgacgtccaagaagctgctccgggatgccggggaaatgcaacaggtccgtccgcaaattgtgaacgcagccaaggaactggccatcaagagaaatgctttgaagaatgaaggtgatgggttctttgaaaggacaagagctgagctctttctgccgaataataccaaaatggaagtcactctgaagctgctcaagaacgaaaagaaagacgaatttttgagtgattttcttcaattggcggatttgtgggcgagtatagactgcagaaacatcataaagctgtacggcgttgcactgttcaaacctgttgcaatggtgcttgaaagttcccgggatggtcccctagatgagtttctgcgccagcataggaaagttcccttttcgtcactgatcgatgtggcccattcattggcctgtgctctctactatctacaagagaagggactcgtgcatggacggatacgatgttcatcgatgctggtaacgtcatacgagcgaagcgagaaccgcttgatagccaaactgggcgatccgggattgcgccagcggcatcaatatacggatagggatttgttgtggataccgatcgagtaccacgacctgggacaaaatgaggtgcaattgttgaaacgggacctgaaggcggatatttgggcctgttcgacgactttgtgggagatttttagccgtgggaaaggttcatcacctaggaatgtcaaggagtttatcgcttccgggcggagattggaagcaccagcggaatgcaaacacataaaggagatctatcagtgcatgttttacggctgggtggttgacccggataaaagattcgcccctcagatgattatttcgaagttggtgcaagcaaaacaaaggaaggaatattgcgagataccccaaactggtatattgaatggaacaaccaattcagcgaatggatcctactcgcaccagagtattaactccatcgatactgattccactttcctaaactcgcgaacggacgtttcccactcgtcgtacgtgagtaatggcagcgatggcgacgctggtagtaatgcttcgagtgagtgcagctcgcagccactcatatcgaacggtggttctagtcattacagcaccggctccaacagtggatggggacaggcacaggccgaaaacttcctgtatgactgtccggactttatcgagctgtccaacgggtcgaaggtgatattccagggggaactgggtcaaggtcactacggcaaggtttactgcgggtgcatcgacgacggagtgaaccagatacaggttgctctgaagactatctacccaatcagtccgctggatgcggagatagcaaagactgacttcaagcgggaggtttccatcatgaaaaagctcaaccatcggaatatcgtcaagctgatcgacttcatcgacgagattgacaaactggttgtgatcatggagttcatggagaaaggctcactgctggattttgtgagctacaactgtcacaatctaactaaactgaatttgctgcgattttctagggatattgctaatggaatgaaccacctgttcgagaagaaaatcatccatcgggacttggcggcgcggaacatcctggtgcagagtatggactgtgtgaaaatctccgatttcggtttggcccaggtcaccgatggcggtaactactacatagcgcaaaatagccgcgatttgccgatcaagtggtactcgccggagacgctgaagaccatgaagtactccttcaagtcggacgtgtggtcgtttggggtgacactgttcgagatgttcacgtacggcgagacgccgttcccggagctggaaattcgcgacgcggaacagctgttcgacttactgacggttcaaagaatcagactgcaactcaccgaccgagatcgggacgtccaggagcagctgatggatccttgtttcatcctggactctcatcagcgcccatcgtttgtgcaattattcgagaatatcgaacaacttatcgaccaatatggcgaatcaattcaacttttctaa

SEQ ID NO: 90 - DNA, 981 bp, Culex quinquefasciatus
atgttagaagtaagcgcccgacaatcttcaggatgcatccgaaaggatggctgcgctaggatcccgaagctgtcccacctgaaggcgctcgatcgcaagctgttcaactactactactaccagctgcggcacgacctgctgcagagcaagatccccgagatcgagtacgacgagtacaagaacaaaatcctcggctacgtcgtcaacgacatgtaccgcaagatggtcgaggacggggtgagcgtggcggacctgaagcgcacctacgaggactacatcccgcgcaagatcaacaaggagcactcgctgctgttcttcaactgggcccgcaccaaggtgttcaactcgctcaacaagatcagcaaccgggagcacgacgtggactacgtcaagactgtctacatcgacgacatcgacaacctggcgcccggctatctgtacgaggagtacaacggccacattccgtacccggaggaggatggccacctgaagccgggcaagtgtcgcgttaagatcaagttcgtaccgtacgctcagccgttgtccaagccggccaagggcgggggcggaaacggcagcaagaagggagcgcccaaggacgagtccgaggagcagcccgggctgaaggtgttttactcgcgagagtggagacacgtggccaacattgacgagatctttaccatcctggtggacaacctgacggtgaacatctccatccaggatcagtcgaatctttactcgatagactttggcagtcagactgaattagactctttcgtaacgtgtttagctggttattatagattaatgtgtaagtggactgtctatctgtgtaagccctacctgtactcaccgtcgttgaatcgactcaccgacatcaagtgtcacggcccgatcggaacgattacaaccccgtacgaactggtggagcacgtgggtcacgcctccagtctgacggtgagtcagggtctcgtgcattaa

SEQ ID NO: 91 - DNA, 4540 bp, Anopheles gambiae
ccaaagtgaatgtgtattgcgttgcatgtagaaattgttccgaaattgttccgaaaaaattgcaaagttttggtctgtgtgtgcgtgtgtgggttcgtcgtcgtacaacatcatttccatcagccatcagccccgtagcacaagccatgagaggcggagcaggccgttgtcaatcagcacaggtcgagagcggacgagcagcaccacgggcgagctgagaaagcacaatacatacggacagcaaccggctagaaaggatggttatgggtggcctcgcaacgcaagcttgccaaagtgacctcccaacggacatcatcgaaaccgtttgagcaaggaaccaaccaatcaacccacagagtaacggccacgggccgacattcaagcgtctgatcaaatgtacagcagaaggcggcagaacctacccacgtctaagccttggcgacactcacacacacggtgggctccaaaggcattagggttgagcccacttaattaagaacgtagaatagagcagccgagcaacagcattccttcaatcgcgccgatgcatcggcaccgatgtgtggttggtgtggttcaaagtcgaaggaattttacatctgtgatatctgtgtgaaatgttcaaagtgcgtttacaacaacacgtgtgtgcggttgcggaaacggcgatatgatgccatcccgttcgcggaaggcgaatgaattgatcaaatgtcacacagaattagaaggtttcccattttaatgtgtccagttccgtcgagcgctggtcggagagcgtacgttgcgtagagaagaccagatttagagcaggttagagctaagcaagaaggagcggaaaccttttacatcctccaagaggaaatggtgcgcgctaaagtttgaagttttaaacaatgttactgcagttataactacttaaacgtctatcttgttatttgcgtccataaacaaaagtgtccaacaaacacacaacgcgtctgtattggtagtaaagacagcaagctatagagattagagagtggtagaaaagggatatcattttccttcctgtgtggctaccggtgcgcgatcgttgcgccggtagttgacccgcggaaaacccccgttcgctatgcccgatgaagcggcgtaccaggtgttcaactatgtggcggactgcttcatccacgtgccggtggtgggccgcgccggcggcgaggacgatacgtgcgagcgtgtctgccgggcggtctgcgagcagctcaagataaagccggtcgtgtttgcgctggtcgggttgcggctgcacgacgagaaatggttcctggccggcggggagccgtccgtccacggacaagaagtcccggacctgtcctgcctgaaagcactcgaccaggagctgttcaactactactacagccagctccggtacgatctgctgcacaaccgcatcccggagatcgactaccggaagtacaagaacaaaatactcggctacgtcgtgaacgacatgtaccggaagatgatcgaggacaaggtcgggctgagcgagctgaagcgtgactttgagaagtacatcccgcgcaagattagccgcgagcattcggtgtgcttcgtgaacgtggcccagaagcggatattcgaatcgctcaactcgatccagaaccgagatcacgatgtgaactacgtgaagaacgtgtacatcaacgatatcgacaacatcgcgccgggctatctgtacgaggagtacgccgccgaaatacagtacccgcggggggagttcagctcgcgcaccggcaaatgtccggtgaagctacggtttcagccctacggtacggcggtatcgagccgcgaaacgaccaagtacggctcgacgggcggtgggctggagcgtacgctagaccacgaggatgcgaccacgacgcccggcctgaaggtgttttatgccagcaagtggcaacacgtgacgaatatcgacgaaatactcaccatactggtggagaagctgacggtgaaactcgcgctggaagaccagtcggagccatactgtatagactttcatgatcagactgaactgaactcgttcgtaacctgcctagccggttactataggttaatgtgcaaatggaccgtgtatctgtgccaggactacctttcctcgccgatgctcaacctgctgaaagagctcaagtgccacggtccgatcggcggaaagtactccaccgacaaaattcgggaaaagaacagcagctgcggtgcgtgcattatacgccagtgcgaggagcagtacgatacctactatgtcgatatgctagaaaccgatggactgataaaaacgtacaagcttatccacgccgaagatcagtggcacgtgcagcgcgacaaggaggaagaggaggcactgcaccggtacaaccagctgacggaggcgctgaagagcctcaacccggagataacgagcgtgtaccggttgccgccatcggacaacgataccgccccgaacctgctgctctgccggccgacgcacaaagcctccccaaagcggctgctgcgcggcggcacgcaggaactgggccagaagcgggcctgcattatcaatgccgccaaggagctggttatcaatcgaaatgcggtggaagatgaaagcgacggttacacgaagcgaacgcgggccgactttctgctgccgaacaacagcaagatggaggttacgctcaagctgctcaagaacgagaaggagggagagtatttgaaggactttctgcaggttgctggccagtgggcaacgatcgattcgatcgatatcatcaagctgtacggtatgaccgtttgcaaaccgatcacgatggtgctcgaattcccccggtacggtcggctggatgagtttctgcggacgcggcgcacctcggtacggccgaccgcactgatcgagatcggccattcgctggcccgggccctgtactacctgcagaagcacggcatcatccacggccacatccggtgctcgtccatgctcgtcacgcagtacgacgagggcgagcagcgcgtgctggccaagctgggcgatccggggatgcacgggcagcgccggctaaccaagcacgatctgctctggataccgtacgagtatcaggatctgagcgagcagagcgtggcccggctgcgtgcggatccggccaccgatgcgtgggcctgcacttcgacgctgtgggaaatctttagccgcggcatcaagatgcacgtgtacaagccggccgagtttctgcccacgcgcaaatggctgcagacgatgccgcccgagctgaaggactcgaagcagatctacgagtgtctgagctgcggctggcacgccgatccggacaagcggctcgcaccgcagacggtcgtggggctgctggtgcatgcgcgtcaattagacggtagctactgcacggtgggcaatggacacgtgaacggtcactcgacgagcaacatgctgaatgggtctgtcttcaaaaatagtatcctgtcaatggaaaccaactccaccttgattcggtcccgtaccgactgcacctcctcgtcctacgtgagcaacggtagcgacagtgagctgcgcagcaatgcctcgagcggcagcagctcgcttccgctgctctcgaactcgatcaaccgtttcagcggcgactcgtactacgagaaaacgttcgtcaactgctcggactacattcagctgagcggcagtgagcgcatcttcttccacaacatgctcggggagggcaattatgggcgcgtgtaccggggtacgctcgagcgggacaaccaggcgccgcgcgacgtcgcgctgaaaacgatctacgacgatcggcccgacctgggccgggtgaaggacgactttcggcgcgaggtcgatattatgaaaaacctgcgccacaccaacatcgtcgagtttatctgcttcatcgaggagctggacaagctggtggtggtgatggagtacgtgccgttgggatcgctgctggcgtacctcggctacatgcggtacgagctgaaggagctggacctgctgtggatggcgcgcgatatagcaaatggcatgaattatctgtgcgagaagaacatcgtgcatcgcgacctggccgcccgcaacatcctggtggagagcaaaaagtgcgtcaaaatctccgactttgggctggcgcaggtaaccgagggcagcaactactacgtggcgcggcacagccgcgagctgccgatccgctggtacgcgccggaaacgctcgaaacgcaaaagtactcctcccagtcggacgtgtggtcgttcggcgtgacgctgtacgagatgttcacgtacggtgcgacaccgtactcgcacgtggacgtcaagagtgcggcccagttgtatcaactgctgcaacgcgagacaaagatattacagcttccggaggatttttcgtacgtgtacgataagctgatggcaccgtgctttaagcgggatccgcacgagcgcatgacattcagcgagctgctggaggagctgaacgacatgatcaatcagtacggtgaaccgatctattag

SEQ ID NO: 92 - DNA, 2283 bp, Aedes aegypti
atgtcgctgtgggcacgcgtcaaccagctgccgcagcccgttctcgagcagatccggtacatctatggcaacagttttccaatcgaggtgcggcactacctggcggaatggatcgaggagcgattgctaaacgtcccagtctaccagcacgaacaggacagcgcctacgagcaggaagctgccaccttcctcaaccagctaatcaacgagctcgagcggacggccatcaacctcccggaggacaacgtcaccggccggatccgcctgaacgagtcagcccggaacttccgccaactattttcgcacaatcccgtccagctgtactcacatttgatcaattgcctccaacgggaacggcagtgcatagcctacccggaagaatgcgtcaacgtgcaggacccggaaattgccgaagtcatcaacggtctccagcagctgcagatgttggtccgggccaacgaaaacgacaaccgcaatctggtcaaagactacgagcatctgctgctcgaaattcacgaaattaccaagaacaaagcacagatggaagccatcgataatgcccagctgcgagagcacgcgcgggccgctctggtccagcaggaacggaacgtaaacgaaacggtaaccctcatcaccggcaaacgcctgaacttggtcgacaacttccgcaaaacgatccagctaacttcgcaagtgcaggaaaaagttctgcacaagtacctgacacagtggaagatcaaccagggtttcgccggcaacggggcatccggcatgagcgccagcaatctggacaccattcaggcgtggtgtgaaaacctggcggaaatcatctggaataccaaggaccaaatccggttggcgatgaagaacaaatccaagctcaacatagaggagcccaacttgcccgacttcctgccccagtcgctggtcgaggtgaccaatctgctgaaggccctcatcaccacaaccttcatcatcgagaagcaaccgccgcaggtgatgaagaccaacacccggttcgcggcgaccgtccggcttctgatcggcaacacgctcaacatccgcatgagcaacccgttggttcgggtttcgatcatttcagaagcacaagcacaggccacgcagcagtccaacaaggcgtcggagcagtcgtgcggagagatcatgaataatacaggaaatctagagtacaacgaaaccacgaagcagttatcggttagttttaggaatatgcagcttaagaaaatcaagcgagcggaaaagaagggcaccgagagcgtgatggacgagaagttcgctttgctgttccagtcaagctttgcagttgggcatggcgatttagtcttttcggtttggacgatctcacttccggtggtcgtgatcgtgcacggcaaccaggagccccagtcgtgggccaccatcacctgggacaatgcgttcgccgacatcaaccgggtgccgttccacgtgccggacaaggtgtcctggaacctgctggccgaggccctgaacacgaaattccgcgcctcgacgggccgctccatgacgccggagaacatgcacttcctgtgcgagaaagcgttccgcgctaacctgcagtatccggtttcgaacgatctgaccatcacgtggtcccagttctgcaaggaaccgctgcccgaccggaccttcaccttctgggagtggttctacgcggcgatgaaggtcacccgggagcacctgcgcggaccctggaacgacggcagcatcgtcggcttcatccacaagtccaaagccgaagactatctgctcaagtgctcgcggggaaccttcctgctgcggttctccgacagtgagctgggtggcatcacaatcgcctgggtcaacgagagcaacgacggccagccgcagatcctgcacatccagccgttcacggcgaaggacttcgccacccggtcgctgtccgataggatccgggacttcgaggatctgttctacctgtatccgaacaagccgaagaacgaggcattcgatcggtacacgaccccgcccggacagccccggaatcgcaactacatcccgtcggaggtgcgggcggtgctcatgccgagcaacaacaacccgatcagctatccgaacacgcccaactcgtacgggcacctgcagtcgccggacgcgtcccgggacactcccaccagcggcagctacaatctggagaacgaccaggtcaatcatctaccgtaccaaccgttggccgacctggagctggaaaacattgacatgttcgcgtcgtcgtacacctag

SEQ ID NO: 93 - DNA, 2592 bp, Culex quinquefasciatus
atgtcgctgtgggcccgcgtcaaccagctgccgccgccggtgctggagcagatccggtacatctacggcaacagcttcccgatcgaggtgcgccactacctggccgagtggatcgaggatcggctgctaaatgccccatcttaccagcacgagcaggatgcggcgtacgagcaggaagcggccacatttttgaaccagttgatcaacgagctggagcggacggcgataaatctgcccgaggacaacgtgacggggcggatccggttgaacgagtcggcgcgcaacttccggcagctgttttcgcacaatccgtcgcagttgtactcacacctgatcaactgtctgcagcgggagcggcagtgtatagcgtacccaaatgagtgcgtcaacgtgcaggatccggagattgcggaggtcatcaacgggctgcaggagttgcagatgttggtgcgggtcagcgagaacgacaaccgcaacttggtgaaggactacgagcacctgcagctggagattcacgagatcacgaagaacaaggcgctgctggagaacttggacaatgcggcgttgcgggaacatgcccgcacgacgctggcccagcaggaacggcaagtcaacgaaatggtcaacctcatcaccggcaagcggctccagctggtggagaacttccgcaagacgatccagctgacgtcacaggtccaggagaaggtcctccacaagtacctcaccaactggaagatcaaccagggcttcgccggcaacggtgcgtccggcatgagcgccagcaatctggacacgatccaagcctggtgcgaaagtctcgccgagatcatctggaacaccaaggaccagatccggctcgcgatgaagaacaaacaaaagctcaacatcgaagagcccaacctgcccgacttcctgccccaatccctggtcgaggtcacgaacctcctgaaagccctaatcacgacgaccttcatcatcgagaagcagccgccgcaggtcatgaagaccaacacccggttcgccgcgaccgtccgcctcctaatcggcaacacgctcaacatccggatgagcaacccgctggttcgcgtttcaattatttcagaggcccaagcccaggccacgcaacagtccaacaaggcatcggagcagtcatgcggcgagatcatgaacaacaccggcaacctcgagtacaacgaaaccaccaagcagttatcggttagttttagaaatatgcaactgaagaagatcaagcgggcggagaagaagggcaccgagagcgtgatggacgaaaagtttgcgctgctgttccagtccagctttgccgtcgggcacggcgatctggtgttttcggtctggaccatctcgctgccggtggtcgtgatcgtgcacggcaaccaggaaccgcagtcgtgggcgaccatcacgtgggacaacgcgttcgccgacatcaaccgcgtcccgttccacgtgccggacaaggtctcctggaatctgctggcggaagcgctcaacacaaagtaccgcgcctcgaccggacgctcgatgacccaggaaaacatgcacttcctgtgcgagaaggcgttccgggcgaacctgcagtttccggtgtcggacgatctgaccatcacgtggtcccagttctgcaaggagccgctgcccgaccggacgttcaccttctgggagtggttctacgccgcgatgaaggtcacccgggagcatctgcgggggccgtggaacgacggcagcatagtcgggttcatccacaagaccaaagccgaggactacctgctcaagtgcccgcgcgggacgttcctgctgcggttctccgacagcgagttgggtggcatcacgatcgcgtgggtcaacgaaagcaacgacggccagccccagattctgcacatccagccgttcacggccaaaaattttgccatccggttgctctccgatcgcatccgggactttgaggatctgtactacctgtacccgaacaagccgaagaaggaggcgttcgaccggtacacgagtccgcccgtcccgtcccgcaaccggaactacatcccgtccgaggtgcgggcggtcctgatgggcccgagcaacaacaacaactccaccatcaactcgtacccgaacacaccgaactcgtacaaccacctgcagtcgccggacgcgtcccgggatacgccctccagcgggatcaccgacatcacgatccgcgaccggagcgactcccagcggagtctggcgacctgcggcgagtaccggcacgccatgtcggtggcctcgtcggtcgtttacagcccggacaacgcgtacacctacatccactcgccggcctactcggacgtgagtccgcagggaccgccggcgcgggaatttcccggttccccgcaactgccggccaccgtcgagcagctgaaccgcggaccgaccaccgcggagacgccgctgtcccgggcgtccggcaacgaggccgtcatccaggaactggtccagtacatgctggacgggtacgacggcgcgccgctcgactgcgacatggagcgggagttgaacaacaactgcgcggccacgaccgtggtcaacgggcactag

SEQ ID NO: 94 - DNA, 2589 bp, Culex quinquefasciatus
atgacgctccagccggtgctggccgcgatcggcaacctgtacggggtcaccttcccggcgtcggtgcaacccaccgtggcgcagtacatcctggcgcaactgcggaccgcccccttcaaccagcaacttccagaaccaatcctcgagcagacggcgatcagcttgttcaacgatctgctcaccgaactggacagaattgccttaacattaccacctggagacatcctccaggtgcagctgtccaccgcagtagcaatcctccgccagctgaacccactgcagctgtacatgaccctgatcgagttcggtcaacctccggaatcctcacccccaacgatcgaccagcaagccaatgcgctacaacaaatggtgcgacaatgtgaagcccaaatcggatccatcgcgcagatgacgacccccttgcagagacagcccgcggtcacccaactgacgagggacctctggatcgtcgtagaacgagcgaccgacctcgcaagccagatcatcggaacgtacttgcggcagtggaggatcggccaggatcggcacggtttggaccgggcgggtttgtcggccacgctggacacgatccagcgcgcgtgcgaagttctggccagcgtggtttgggccgttcgcgaccaaattgtagcgcttccggtgctgggagtgccggttgagttggccgggctgttcgatcgaacccgggatctgctggcgctgttggccaccaagtgtttcgtcgtcgagtgccaaccaccgcgggttatcaagaccaacacgaaatattcggtcggggtgagacatctgctcggaggtcagctgcactccaggatggtggggatgaagcttcaaacttgcatcgtttcagaatcccaagcacgcaacatccaacaatccaacatcgttacgatggagaacagtggagtgctaacgttcgacgatggcgcactggagctggacaaagattcgaaacatttgaaggcaaccttccgaaacttgcaggtcaagaagattcagcgtcaggaacggcgcggagcggactccgttacggacgaaaagtttgcctttctgtttgatcttgcgtttgccgttggagatttgagattctcggtttggaccatttcccaaccggtggtggtgatcgtacacgggaaccaggaaaccgccgccaaggccaccatcgtctgggacaacgcgttcgccgatcccagccggattccgttcgagatatcggagcgcatgggctggaacgttctcgccgagatgctcaaccggaagtttcgttcgatgctgctggatcgtccgctgtccgcggaaaatttgcactttctcggcgtaaaagccacgcgaagaaagcttccctttccggttccggacgcggagctcgtgacccgcgcccaattctgtcgggatttaatcccggcgcggcccttcaccttctgggagtggttctacgcggctattaaggtaacccgggattccctcaaagatatctggaacgatgggcacatggttggattcgtcgataaggctcgggccgagcaggatctgcgccagcatccgccggggacgttcctgctgcggttctccgacagtcagcagggtggcatcacgatcgcgtacgtcaccaacgaaccgtcccgtcgtattcagcacatcaatccgtttatcgggaaggatgcggtcaacgccataaacgcaatacgtgacctgccgcagctgaagtttgtctatccgggagttccgaaagaggaagcgttcggaaggtattttcgcccgaaggtgctgcccgttgcgggttacgttccggcagagcctgcggctccaaatctggccactcaggctgatggattggcaaacaatcagtcggtcaattcgtcaattgcgaagctgggaggccttccccgctccgagtactacctaactcaaaacggcaaacgactcaccgatgtgacgccgtcaccccttccggatgtccccatccggctgcaggagcgccttcccgcagggaagggcggctttggctccatgttgcgcgccatcggtgcccaaatcgagaagaccaccaaccgggaggcctgtcgtgatctgagcggacgccgcctccgcgacatcaacgaggaaaagcgtctcaaggcgtacctggacaagcagaaggaggcggacacggaggacgaagcggccaagttgcagaaaaaggtggacaaactgctggccaaaccgaagcacgaatttcacgacgcacggtacaaccaggcccggactgacctcacgcagaacgtggacgaagcggtgcaggagggattgaggagggcggcggaggtggcagccgccggggagggtggttccaagcggaaggccaaggacgacgggagtgacgccaagggcaagaagaagaaggccaagggagcgctctggctgggagcggacgatttggggtccagttccgatgatggagatagcgatgacggaagcgattcggccgggtcttcgagtggagtttcgtcggcgaagcaaacggtcgggccgacgtcagaggaggatgagagcggcagtgcggacaaggaggtggaagttgcgtcgggttga

SEQ ID NO: 95 - DNA, 2169 bp, Anopheles gambiae
atggagactcggttgcatcaacttccgccttgtattttagagcagttccatttcctaaatgatttgaaatatcccgtgttaatacgacagcatctgggaaattggatcaaagatagtttgcacaacgcgccaacttataccaacaacatgcaatcgatgtatgaacttgatgctgccaagtttttcactgctctcgtcaatgaagtagaccaagtatcagctaatcttccaaataagaggaaatgtcttctctgcaggtcggccattatgcttcgagaccaaaattttcaaaatttgacacaattatatttgacccttttacaccaaatacaaccaaattgcgaaaaaggttgcaaaacagaatatacgattgcgcaaacttcgtcggatgggcaacagacagatgtgttatatgggttacagcagcttcatgtaatggagcgaaacaattggaaggaaacccaacaactcatacaggaatgcgagcaagatcacgtccagcgactatcaaatcagcgaagccataacaaacgaattcagtgctatagcctgaaacaaagatctcttgtagatgcattccagaagacaatacgaaaagccgaagaggtgctgaacttggtgtataataagtatatcttcgaatggcagaaaacgcaaatgtttccggaggtccgttcgacaaatgcgtacagtctggatgaaatacaaacatggtatgaaagtttagcagcgatcatgtggaacacgaaggatcagatacacttgacaatgaaaagccagttacgagaacatgtctcacaagaaatcaactcagacctgtggaaggttatgaaagacgtgaaggatttcataaagttgttgctacataaagcattcatagttgaaaatcaaccaccgcaagtgatgaaaatgaacacacgcttttgtgcaaccgttcgcctgcttatcgacaatgcgctcattatgaaaataggaaacccgaaagtaacggtgtccatcatttccgagactcaagcacaacaaatccaaagtacgaacgctgccgcagatttctcagctggtgaaatcgaaaataacattggaaatctgcagtaccaattgagcaataaattcctagcgaacttcagtaacatgcggctgaaaaagataaaccgcggcaacaggaaactaaataaactcgtggtggacgagaagtttgctcttttgttccagtcaagttttaccttggaacaggaagagctgacagttaccgtgtggacattatcacttccagcagtggtaatagtacacgtaaatcaggaacaactggcatggacaaccattatctgggacaacctatgtgcaaaagccgatcgcaaactattcgaggtaccgaatctaataccctggaatagactggtcgaagcaatcagcatgacatttagtgcacgggtaggtcgtggtttgaccgatgaaaatatgcaatacatgtatcgtaaagcgtacagggataaactttcgttttcagtgtcaaacgaccaaatgatcagctttgcccaattctgcaaggataccacaccggaatgcaactatacattctgggaatggctttatgccgcactgaaaataatacgcgatcacctacaggttctatgggttgacaataccattatcggcttcatacacaagtctaccgcggaaaaatatctggctaagtgtgtaccggggaccttcctgttgcggttcacggatagtgtactgggagggatcagcattgcctgggtgcacgaatccaacgacggacaaaggcaggttctacacattcagccatttacagcgaaggatcttgtcgttcgttccctagcaaatcgcatctgtgatcttggtgaactcacgtatctgtacccaactattccgaagcaagaggcattcggtcgatacacagcacctgcaatacaaaaacctcgtagcaaacattatatttcagcagaaatgcgtactgtgttaatatttgctccaagtagcaatcaaagcagctccagtaccccaaatgctgaacaatcgccaagtacatcatccaacgatatgttttccaacgagtatgttcttacaaaccttgatgagatctacaaatttgaaattgagaatgatgacatgctttcgattcaggattattgggagcaacagtaa

SEQ ID NO: 96 - DNA, 2181 bp, Anopheles gambiae
atgtcactgtgggcccgggtgaaccagctgccgcagccgatcctggagcagatacgcttcatctacggcagcaactttccgatcgaggtgcggcactacctggcagactggatcgaggaacgattgctcaacgcgccggtgtacacgaacgaccaggaggcggtgtacgagcaggatgcggccaactttctcaaccagctcatcatggagctggagcggacggcgatcaacctgccggagagcaacttcacgatcaagatacggctgaacgagtcggcccggaacttccgccagctgttctcgcacaatccggcccagctgtaccagcacctgatgaactgtctgcaccgggagcgccagtgcgtcgcctacccggacgagtgcgtgaacgtgcaggacccggaggtgacggaggtgttcaacgcggtccagcagctgcagatcatggtgcgcacgaacgagaacgacaaccggaacctgatgaaggagtacgagcatctgctgctggagctcgcccagcaccagaagatggtgaacgatcggctgcagctgtgcaccgggaagcggctcgcgctcgtcgacggcttccgcaagacgatcctcatcacggacgaggtgcagaacaaggtgctgaacaagtatctgtcgcagtggaagattaaccagggctttgccggcaacggggcgtcgatgatgagcgccagcaacctcgacacgatacaggcgtggtgcgaaagcctggccgagatcatctggagcaccaaggatcagatccggctggcgatcaagaacaagtcgaagctgcacgtcgagcaggaggacgtgccggacctgctgccgcaggcgatggtcgacgtgaccaacctgctgaagatgctcattaccaacacgttcatcatcgagaagcagccgccgcaggtgatgaagacgaacacgcggttcgccgcgacggtccggctgctcgtcggcaacacgctcaacatcaagatggtcaacccgcaagtgaaggtgtccatcatttccgaggcacaggcacagcagacgcaacagaccaacaaagcttccgagcagtcgtgcggcgaaatcatgaacaacatcggcaatctggagtacaacgaaacgaccaagcagctgtcagtgagcttcagaaacatgcagttgaagaagatcaagcgcgcagagaagaagggcaccgagtgtgtgatggatgaaaagtttgcgctcctgtttcagtccagctttgccgtcggccatggcgatctcgtcttttcggtatggaccatctccctgcccgtggtcgtgatcgtgcacggcaaccaggagccacagtcgtgggccaccatcacctgggacaatgcgttcgcggacatcaaccggatcccgttccaggtgccggacaaggtgatctggaaccagctggccgaggcgctcaacatgaagttccgcgcgtcgaccggacgttcgctcacggcagagaatatgcacttcctgtgcgagaaggcgttcaaaacgaacctgccgttcccggtgccgaacgatctgaccatcatgtggtcgcagttctgcaaggagccgatcccggaccgctcgttcacgttctgggactggttctacgcggcgatgaaggtgacgcgcgagcatctgcgcggcccgtggatggacggcagcattatcggcttcatacacaagtccaaggccgaggactatctgctcaagtgcccgcgcggtacctttctgttgcgcttctccgacagcgagctcggtggcattaccatcgcctgggtaaacgagggcaacgacgggcagccccagatactgcacattcagccgttcacggccaaagacttctccacccggtcgctgtccgaccgcatccgcgactttgacgatctcttctacctgtacccgaacaagccgaagcacgaagcgttcgaccggtacacgacgccggccgggccgccgcgcaacaaaaactacatcgcgtccgaggtgcgggcggtactgatgcccggcccgaccaacaaccagatgaacagcttcccgaacaccccgtcctacaacatccagtcgccggatgcgtcccgcgatacgccctcgaccggctacggtcagacaaactacggtcaggtgcccgatttcgagctcgagaacattggcatgttttcatcgcagtaccactaa

SEQ ID NO: 97 - DNA, 2341 bp, Aedes aegypti
caacacaaccgtcactccctgttttcgccaatgaaaatattcttgatacagcagcgattttttgatactcgtcaattataagcaaaagattagtgatttactgtgaaaaaactacttcgaaaggatattcctttgcccgttggcgtccgggttcgatatcggttcggaattcgtgtgaaactagccgtatacgcccaccaataattgccctgcaaaaacgatttccgtggtgcacaatgttgagtgggatcatattaccgaggaacttatgacggaaatacacgattgatatcttagcttagataatcgcgtatcgccatatttgtgacaaataaacgatgaatacccatacacttggaagcgattctagctgctgcggacagcagtctggcaatagaagcgatcatgctctttcctacgacaaagaatgctcaataaaaactaatacatggagcttgggtaaaggatcccaacagttactatggagtctttccagtaaaagtaacgtatctacaatgcagcggaattccagcacattgcataaacgattgtccagttcacacaattcattaagcgattcggcaaccaaaaaagttgacgactcgatattcattacacaagctatgtcgcacgatgccctagatgacaacaaaatattagatttttacaatgttcctcttgactcggatatatactctgcccccatagactacattacaaaccagtataccattgaatcagtattgcacaaatcgaagtctagtaagccagtcccatttcagaaaaacgaatttaatttgaagagaaggcagggacccgtactacaggaagcgaacaataggaagcaagtgatcaacaagaaaacgcagtcgtcatacgctgcagaacatgaacgagaccagaagaggcgcacaatttccagcaaagttagcgagtgcaacagcaaaaagaataacttttcgttcaacttgaagcagaagctatgcaacatttttcgcatcagcaaacatcagcaatatttaagaggcaaaaaatcatttcttgacggtcatgccaaacaaaatgtttgcggcaccaagtctaaatcgatagatgattactacaaaaagtccagtgtatcgacgcgtaaactaccaccactgcctatgtcagcggagaaagcaactgtaccaaacggtatttcattggaagaagcaaaggattcgaacgaaacgcataaacaggatgaggctgcgcatatcatggattttacggcaagcattgataaagtgaaagattgcggctggtattggggtcccatatcctcagaaggagccgaaaagatcctgtcgaatgaacccgacggaagtttcctagttcgggatagttccgatgatcactacatattttccctcacgttcaagctgaatggatccgttcgacacgtcagaatagatcaagatcaaggtacattttcgttcggatcgtgtgccaagttcaaatctcgaactataatggaattcatcgaaaacgctgtggagcattctaggagtggtagatatttgttttttctacacaggcgaccagaacatggtcctttacgcgtgcaattgacaaaaccggtgtccagattcaaacacgtacaaagcttgcaacatctttgcaggttcgtcatccataaaacgataataaggaaagatctaattcagacactaccattaccacggagattgctagactaccttaattataagaattgcctttcggaacgagttgaggtggacatgacttctcatttcggacaatgcgtaggtgatttttaaactgtatattattattacaattattattattaccttatcactattatttatataaaaagtaaatgtgaatactagcaatcctatgaagcgtaatcatgtgtttgtaaagtttagtcaaaactgatcgatagaattgtgattttttaatggacgaataaagaaagtataataaaattatactttacacgaatatatggttgatttgactgaatgaaaatgatatcacaatgtcaagtaacaagcgtccttaggtgctcctcaaccgcaaaaagtcatcgtatgcatggctttgttcggtttctctgtaggatatcatctgtgttagtcattcttccggtatacgtgcaacgtgacgagctttacacagcctgttgtgttttatacgtttgaaaatatttatatttttatacacatgttgtattgtaaaactcctgaatgatacgctgccagatcacacacactcatcagccaggttaaggcctgggtggcctctgtggtacgtagcagacgtcttcattcgtctcggtccatggctgccc

SEQ ID NO: 98 - DNA, 958 bp, Aedes aegypti
cgtttacttgtcgcgagtcatgaattttatttaattgtgaattttctggtgactttgaggacccgaagaacagtcatgcaaaaaagccaaccagagagaaccttcggtgttcttcaacggagaaatcaactgtaccaaacggtatttcattggaagacgcaaaggattcgaacgaaacgcataaacaggatgaggctgcgcatatcatggattttacggcaagcattgataaagtgaaagattgcggctggtattggggtcccatatccccagaaggagccgaaacgatcctgtcgaatgaacccgacggaagtttcctagttcgggatagttccgatgatcactacatattttccctcacgttcaagctgaacggatccatccgacacgtcagaatagatcaagatcaaggtacattttcgttcggatcgtgtgctatgttcaaatctcgaactataatggaattcatcgaaaacgctgtggagcattctaggagtggtagatatttgttttttctacacagacgaccagaatatggtcctttacgcgtgcaattgacaaaaccggtgtccagattcaaacacgtacaaagcttgcaacatctttgcaggttcgtcatccataaaacaataataaggaaagatctaattcagacactaccattaccacggagattgctagactatcttaattataagaattgcctttcggaacgagttgaggtggacatgacttctcatttcggacaatgcgtagatgatttttaaactgtatattattattacaattattattattaccttatcactattatttatatgaaaagtaaatgtgaatactagcaatcctatgaagcgtaataatgtgtttgtaaagtttagtcaaaactgatcgaaagaattgtgattttttaatggacgaataaagaaagtataataaaattatactttacacgaat

SEQ ID NO: 99 - DNA, 2036 bp, Aedes aegypti
gtgatcttgttctgcaaaatttggaaacatttaatattgtgtctaaaatggaaaaggaaagtgagattttttacagattcaagtggctcatgtccctctcaagaaaacgttcttctgaagcagaagaatcttccaaagagggtagtaatgcaccatcagtgaaaatgacacaccaagggaatggaatgttttttactctccgtaaacgatttcaaaatttgacttcaacaaaagtagaagcttgtgaaccggagtttgctttggacagaggacgacgaccaactgctgagtcttcaaataaatgtaccgtaaatgatttttctagaattgtcctggagcgacattgcgagaatcccatcactttctcctcacccaatgtaaacgtacctgtgatatcccaaagcaatgatgacccaacttcggtacgagtgcaggatgcaatttctcctctggatccttgctgcactaccaatccggataatctcgaaactatgatgaacaatgtgagaacagacctcttacggtacggatggtattggggaaaactgacccgatccgctgcacaaaagcgtctcgctcgtcaagacaatggaacttttctagtgcgcgattcggaaaccgaaaaacaccagtttgccatcagctttcgaagctccggaataacactacactgtaggatcgattataaagataaaaattggtcattttcgggattaacagcaccaacacactatgcgacgatgattgagctaatagaagattctatgaaaaagtcggaactggacgtcattggatttgggaagcaaacatgtcctttaacacctccatttcccgtacgattaagtaagccaattaatcgtttcttcgaagtagcaacccttcaacatatgtgcaaattcattatacgacagcgagtagatataaaggatattcgatatttacctctacctagtaaactccaaaaatatattgaggagaacgtataaattcgagcgcttcagtactgtctgtgtgcgcacctgactgggcaaaaaggataatgcacaaattatctcatcttgtagcgttctctgcttaggtcctctaaaaaatgtgaggaatgcattgaggtggctcattttcatatgaaaaaatcaaagggtaaaatcttatgttacagtccacaaatttgttcattcgatctcgcagaaggtactctaaaagttagaggggaatccatcaagtttagcggctcaagaagtatggagaaagtcgatcaaatatgcggacacggttgaatcatttatcgtaaagctatttgattggtcattgacgtaaaggacatttggcattatattttttcatcatgagtaggcatcttttgcaataagaatacaattctggttatgccaaatggcccgcttccatacgggaaaaaatgtttctattacatttccggccatatgtgacgctgtagttgataaaattctttcggttttaatttgaaggttctacaatcaatggatagaagccttttcgcttagaaacaaaacatgttataggtaattagggaaactgaaataataaacggctttttattattttttttttgtttattgcagtcttcttcttattgagaattcttaaagtcactaacgaaaaaaattcacatataattgtaacattagtatgtagttacgatattttcataaatacatagaggatgtccccgaaagtagcacgactttaccatactgacatttcgagactagtgcagataaaaaactgattttcacacattttattcttgcacttaataagagaatataggaagtgatgattatatgataaatcaacgatgctgttagaaatgccatacaatgctaagtactatgatgttattacggtccgacagcgctgcagcggcgggtaaattctcaaatttcatgtgattatgtagtataaattttgtgaaccaaatgaagttttctacaataccgctagatttagatcatgagagataaatcaggaaaaaatattcaataaacccattcaac

SEQ ID NO: 100 - DNA, 2063 bp, Anopheles gambiae
ggaaagaaattactattggtgctttgtgatccttttactggaaactggcagcgttagaattgttgtgggaaaaagtacggcgttcgagtgcaagtgcaaggtgtgaacgtatttccccgcaagaccgaaacaaagatgattgggacggattaacgtgttggcccgcggtacgcggtggcactgtgtggaagctcgtctgtgggtcggccgagccaagcgaagtgaaaaattaactggctaaatgtgtaacagaatcgataaagcaatcgggtagtttacaaaaaagcaatgcagaacggaccggagaagaacggcagcatcggagacgggcagcaaactctgccatacgattggcaaatgtgttagaaaattaatgctccacagaggctaaaggctatttttgctcactccgtacgactccttttggcaagcggtaaccagaacgcgtgtaaattgtaataaccattctgcaaagcaacatgaatgagaagaagaataagttgaaaagtagcgcttgtaaagcaaacgacaatccgctaaattgtccgctagagaaggcggacgcgtcggaaacgtatctgctgaagataaaaacatggagcccgggcaagcggtcgcagtgcttcgtcacactttaccgccacagtaaaagcaatatttccacgatgcaacgcaattccaactcgcttcgaacgcgcctatcgtgctcgcataactccctgactgattccataaaaaataaagcagacgattcggtgttcatcacgcaagcgatgtcacacgatgcattagacgacaacaaaattcttgatttctataatgttcctatcgattctgacatctataccacgccaattgatttaataaggaatacctacaacgcggaaacgtctttttatcgcaaccggaacgaagcatcacagagaaacagttggaacaatttgttaaactacagtgaacagatcagctctattaatgagcgtaaaaacaacaaaccccacattatacttgacagaaaatcaaccaaggtggttgacaaacacaccaacagtgataaagcggacagcaagcgcaactccatctcgcacgagatacgcgctcagtgcaaaaagtcaaacttttccgtaaatcttaagcaaaagttttgtaacatttttcgagtaagccgacagcagcaccacaaaccgttcttgggcaacaagcgctcgatcgtcgccagcagagcgaaagataatgctgtgtgcgtcaaagacaaaaatgaaagcgcgatcggtaagaaattaaacactccacggaagctgccgccgcttcctgccaatgaatctgatttaaggtacctaatgggtgatactagcgaccagaagaagaaatcaaatgaaaggaaatcgtcgatggactttactgcaagtatagaaaaagttcaagagttcggttggtactggggtccaataacgtctgaaggagcggaaaaaatactatcgaacgaaccggatggtagctttttagttagagacagctccgacgaccattacatattttctctaacattcaaactaaatggaacggtgcgacacgttcgaatagatcaatatcaaggatcgttttcattcgggtcctgcgctaagtttaagtctcgtacgataatggaatttatagagaatgccgtggaacattcaagaagcggaagatatttgttctttctccatagacgtccggaatatggccccatgcgtgttcaattaacaaaaccagtttcgcgtttcaaacatgtgcaaagcctgcaacacatatgcagatttgtcatccataaaacaatcaagcgaaaagatcttattcaagctcttcccctaccgagaagagttttggactacttgtgttacaaaaactgtctttcggagcgtactgaagtggatttgctaagcagcctcgaaaaaccaaatattgtactccgttagaagtgaagcgaatgcacattttttcggatagtggatgtataacataatatcgaaaaaaaaaaacaaaacaaaaaaactgaaacatatataacctaccctcgtaaaact

SEQ ID NO: 101 - DNA, 954 bp, Anopheles gambiae
acgtcaacggcagatggactttgccggttcaattggtttccatccctgcgaagaaagcgttcctcgtcaacaactgaagaattgtttaccgccagcgatgaaaacaatcacgacagccaagcagaagggggtagcgtgttttacacgctacgaaaacggttccagaagaaatttacctcggtcaaagtgaaagcctttgagccgaatgtggccggtacgtttggggaacgacttccaagcgatacctgcgtgaacggaaatgattttgcacggatcgtcattgaacgacatagtcaaaaccctatccggttttcgtcacccaatgctaacttacctgtgataatcaacagtagagatactgaactaaatacgggggaagaccgaagacccctatcagtaaccgccccatccgctgccacatccgaacctagcacctccgaattggacgatatgatggcgcaaatgcgtatcgatctgctacagtatggatggtattgggggaaacttacgcgtttagcggcacagaaaaggctagcccaacaagcgaatggaacatttttggtacgagattcgcaaaccgaaaaataccagtttacagtgagttttcgaagctctggaataaccttgcactgtcgtatagactttgaaaataattactggtctttttctggcttagcgacacccacgacgtacaaaacgatggtggatttgatacaggatactatgaagaagtccgagtatggggtaataggttatgtaaagcaagacacaacgttaatgcctccgtttcctgtgcgactgactaagccaatcaatcgattctacgaagtttcatccctgcagcatttatgccggttcattatacggcaaaaaattgatgccaaatccaccaacgaactgccactaccggaaaagctgaaaaaatatgtagaggaaaacttctatgatctctag

SEQ ID NO: 102 - DNA, 597 bp, Aedes aegypti
acaggtaagatgtcctacgacaacgtaggaagaataagccattcaacaaaaaactcactcgcgtttcaggtcgacttcatccactgtttggtgccggatttgcagaagattaccagctgctgtttctactggggcaaaatggaccggtacgaggcggagaagctgctcgagggcaaaccggagggcacgttcctactgcgcgattcggcacaggaagagtttctgttttccgtttcgttccgaaagtacaaccggtcgctgcacgctcgcatcgagcagttcaaccataagttcagtttcgactcacgagatcccggagtgtacacggcttcgacggtgaccggtttgctcgagcactacaaagatccatcctgcgtgatgttcttcgaaccgatgctgacctacccgctgaacaggaagttcgtattctccctgcaacaactttgccgcgcgaccatcgttagcaacaccacctacgacggtatcaacgatctgtccctaccgaaatcactcaaatcctacctgaaagagtaccactatcggcagcgggttcgatacaggccactggacgatggtccgatctaccagaatctatag

SEQ ID NO: 103 - DNA, 438 bp, Culex quinquefasciatus
atgttcttcgagccgatgctgacgtacccgctgaatcggaactttaccttttcgctgcagcagctgtgccgggccacgatcgtcagcaacaccacgtacgacggcatcaacggcctgccgctgcccaagtcactcaagtcgtacctgaaggagtaccactaccggcagcggatccgcatccggccgctggacgagcacctacggcgccggacgcggtcacagcggaatcggagtggtggccacaaggacaattactgggccggtctgctcgaggtggacgataattggcccgacctggagcggcgcggaatggtgggtcgcgatttgggtcacctcattgcggcggccatcgcgcaggaacgggaagagcgggaacaggcgcggcgcgtccgcacggagaagattgtccagaagctgttttgctgcttccggggctga

SEQ ID NO: 104 - DNA, 972 bp, Culex quinquefasciatus
atggtggattcatgcgtttgtaccgcgtaccgcaaagtggacgacattcctgcaatccccaccagcaacggatatccgctgtcggcgagttcgttggcgctaatgccacatcaccacgcggcggccgcactgcaccaccaccatcaccatttggaggcaccgacgtcggcatccaacggcggtcccggcggcggtggaggaacggcggcagcggccactaatcaaccgcagcagcagcagcagaaccacgcattcctgttcccgtcggagcatcacgggcatcaccatccgggcacgaccacgaccatcattcaccgcatcgatggcaacacggcccaggcgctgtacggcagtttgggcgccggtggccaccacggaggcaactcggtgattgtcgtttccggtgctggcatgttcgacatctcgaggttcaacagcagcgatgagttctcgctggaagactgcgacgaacgggcgcggttgcagcgcgagctggagatccgcgaaggcgtcgacgcgccacccaactttaccccccgcgcgctaatgtccggtgggacgttgaccggtgggacggcactgggtgccgtcggcggagccgccggtgttgcccaagccaaccagattgcattcgtgtgctcgccggaaacttcgtcggcgctgagtttgctccagcgcgggctcatgctccagaaccagcatctgatgcacgccgaagaaatgccccgagtgcactcacaggtcgacttcattcactgtctggttccggacctgcagaagatcactagctgctgcttctactggggcaagatggaccggtacgaggcggagaagctgctggacggaaagcccgaggggacgttcctgctgcgcgattcggcccaggaggagtttctgttttcggtgtcgttccggaagtacagccggtcgctgcacgcgcgcatcgagcagtttaaccacaaatttaggtga

SEQ ID NO: 105 - DNA, 675 bp, Anopheles gambiae
aacaatcaccaccaccatcatcatcatcacgcgatggccgctgccctggtggccgaccatcatccaacgttcttcttccagcccgcacaccatgctccggcggtggcggcaggagcgcccggagcggcagccgctgctgcagcaggcccggccgcactgttcggtacgcttccgctcggtgcaggccatccgcccgcgaacgatgtgatactgctggcggactcgcccgtcctgtttgatcttaccagcgacgacttctcggtggaggactgtgacgagcgggcgcgcattcagcgcgagctggaaatccgcgaaggcgtggacgcaccgcccaacttccatccgcgccggctcatgtcgggcggcacgattgcgtccgggccggccgccaaccatccgatcgcgttcatctactcgcgcgacctggtccagcgcggcctgctgatggcgaacaagctgatccagccgctggatgcggcggcggcggcagcggcgggcgtttgcgttgcccggtccgggttcggccggctgcgcatccactcgcaggtcgactttatccactgtctcgtgccggacctgcagaagattaccagctgcagcttctactggggcaagatggaccggtacgaggcggagcggctgctcgagggcaaacccgagggtacgttcctgttg

SEQ ID NO: 106 - DNA, 2553 bp, Aedes aegypti
gtttgtgcaggaatatttttttgtattttgttaaatttcttgcattttctctgataatttgtgcataaaagcaacaagaaagattatgctttgagtgatagtgtcgggagcaagtgaaatacgcgatacgcacgtaattaatttcatgtgaacgggaccagcagaaaatggagatcgtaaaaggacttggtacatcagcttcgtgtatctgatctgcagcaactacttggggaaaacaacatcagcagaagtggccggaaaagcgaactgatcgaacgtgtattaatccttgttcgtcaaaatatctcagtcctcaagtacaaagtccgtgaccttcacaaaaaagctcaagaggagacagaactgctgaagcaagcagcagagactccggtaataactactcaacccatacaacctccaccacctgttcttcctccagagcctccggtgatctcacgggtaccgcagggaatgtatcaacaacagtatgcaaatgcagtgcagaatgataaccgtggcgggcaggttcacgcaaacggaatcgttcctattccatacccggaagcaacaccgaatccgggctatccaatacacccggacgtgaagctaaagaagctagcattttttgacgtgcttgcaacgttgctgaaaccggcaactcttgttcccagcaatactacgcagcgcatccaggagggctcattcttcttccacttgactcctcagcaagcaactgatattgcgactaacagggatatccgaaatgtgaacaaaatcgaacataccattcaggttcagttgcggttttgtctgctggagacctcttgtgaacaggaggattacttcccaccgaatatcgttgtcaaggtgaacaacaagctgtgcccgttgccgaatcccatacctaccaacaaacccggggttgaaccaaagcgtcctcctcggccagtaaatataactccaaatgtgaagctctctccattggttgcgaatcacattgcggtgtcctggtgcacggagtataacagaggctatgctgcggcctgttatctggttcgtaaactaacttcctctcagctgctgcaacgcatgaaaactaaaggagtcaaaccggccgattacacacgggcactgatcaaagaaaaattgaatgaagatgcggattgtgagattgcaactacaatgttgaaagtctccttggtttgccctctaggaaagatgcgaatggcgaccccatgcagatcatcgacatgctcgcatttgcagtgctttgatgcttcactgtatctgcagatgaacgagcgtaagccaacttggaactgtcccgtctgcgataaggcggctatctacgacaatcttgttatcgatggctatttccaagaagtacttgcatctaacaaattgtctagcgaagataatgaaattcagcttcacaaggatggatcgtggagtactcacgttaaaaccaacgattcgtgtactttggatacacccagcaagccagttcaaaaagtcgaagttgtttcggatgatattgaaataattacaacggatcccccaaaatccagcatcaaccaagctagcgttatttccagtagtgaaccttcttcgactacagctccttcaagtgatacggtggatttgacgctcagcgattccgatgatgatctccctttgaagcgcaaaacagtaacccgtgctgctgctggcggccagagtggcactaatgtaactacctcgagtgcaaccactgccgcaagtacgacgagttctgcaatgactgctgctacagctactgcttcggcggtatctaaaccaaaaatgaatgaagatgcatcgcaatctgtaatatctctagattctccatctccaccgtcgacaccaaacccaccagcatacaatagcggggtttcagctatgtcaaataaccttgaattattattcaataatttatgaacacaaatacacatacagatgtttcatctacaactgctagtacgccaaccattccataccagttgccgataagtccactagaacaagctagcaatttaccactcaatccacttgcactaaacagatatgaaccagcaccggaagatgtgcagtcttacatttacaatcggctaattaacgacgcgcaagaattgtcctacctaacgagtcaatggagtgtgcaaggttatatgcacggcgcaacgaacggtgaggatatgcacaatttgcagcgttgaaatagctcatgcgagtggacaaacttttgctgaatcaacagttctacaaatttttatgaataagcatatgctaggaaaagatcataacaatagttttacacagtatatcaggcgcataagcataaggtgaaacaatagattgttccaatcgatgaaatggaaagcaaaaatgttcattttgtacacgacactgtcatgtacacattaaattattaaactcgggtatttggagtgtttacaccgatgaaaatatttaaacgagttttctgaatgattatatacaaatcaactgtaataaagacaaaaaaaagaaaaacgc

SEQ ID NO: 107 - DNA, 1767 bp, Culex quinquefasciatus
atgtgcgtttctagtgtttttttttgtgattttccggacctagtgcatcagcttcgtgtttctgatctgcaacaattgcttggcgagcataacattagccgtagcggccgcaaaagcgaacttatcgagcgtgtcctgattttggtccgccagaatatatcggtcctcaagtacaaggttcgcgagctgcataaaagggcacaagaggaagctgaagcccttgccaaggctgcagagacgccatcggtgatcattagtaaggctccccccgctgcggttccgccacccgaagtgcacatcaacacttcagttatcagcgcaccagttcagacagcaatctcgcgtgcgacgccgagcatgtaccagcaacagtatgctaacgcagtccaaagtgacaaccgtggcggacaaatgcacaccaacggcatcgttcccataccgtaccccgatgcgacgccgaatcccggctatccgatccatccggacgtgaagctgaagaagttggctttcttcgatgtattggccacacttttaaagccagccactctggttccgagcaacacgacgcagcgcgttcaggaagggtccttcttcttccatctgactcctcagcaggccacggacattgcgaccaatcgggacattcgcaacgcaaacaaaattgagcacaccatccaggtgcagttgcgattctgcctgctggagacttcgtgcgagcaggaggactactttcctccgaatattgtagtcaaagtcaacaacaaactttgccctcttccgaatccaatcccaaccaataagccgggcgtcgaaccgaagcgtcctccgcggccggtcaacattacgcccaacgtgaagctgtcgccgatcgtggcgaaccacattgccgtgtcctggtgcacggagtacaaccgtggctacgctgctgcatgctacctggttcgcaagttgacttccacgcagctattgcagcgcatgaaaaccaaaggcgtcaaaccggccgattacacaagagcgctgatcaaagaaaagctgaacgaagatgccgactgcgagattgccaccacaatgctgaaggtttctctgatttgtcctttgggcaagatgcgcatgtcaacgccttgcagatcgtcaacgtgttcgcatcttcagtgctttgatgcttcgttgtacttgcagatgaacgagcgcaagccgacatggaattgtcctgtctgcgacaaacccgctctctacgataatctagtaatcgatggctacttccaagaagttctggcttcaaacaagctgtccggcgatgacagtgagattcagctgcacaaggacggatcgtggagcacgcacgtcaagagtaacgacacctgcagcgtcgacacgcccagcaaaccagttcaaaaagtggaggtcatctcggatgacattgaggtcataactaccgatccacccaagtccagcatcagccaagccagcgtaatatccagcagcgagcctacctcgacgacagccgcctctggcgatacggttgacttaaccctcagcgattccgacgacgatgatttaccgttgaagcgtaaagttgtgacgcgttctagtggcacagcgagcagcgcgggaagtgcttcgagtcccgccgtggccaccgcagccgccacgcctgccccggcagcatcgtcctcgtcttcgtcctcagtaacgaagccaaaaacgaatgccaattaccaattccgcaccagattctacatcgtcctccgtccggacgcgacgtaa

SEQ ID NO: 108 - DNA, 2050 bp, Anopheles gambiae
gtgtatacccctgaaaccatgtttcgttttcgtggataagcatttctgcatttagcacgggtagcacgcggggctacgaccgtacagcttgaggataaagtatttttcatattcacattcagaaactcaagccccacgtgtggtgtagatgtgtaaacctgtggagaaccaggagtgcgaggcacagaccaggaacgagaattgttccggtggttctgccgctagccagaattggtaaatcaactacgagtgtgcgatttacagcaattgcttggcgaacacaacataagtcgaagtggtcgcaaatcggatctagttgatcgtgctctgaatctagttcggcagaacgttcaagtactgaagcatcgagtgcgtgaattgcatcgaaaggctcagcaggaagcccaggaactattgacgtcgtccacgaccagcacatcaggcagtggtgcgggcgaccagtcgctgctgccacaggtcgtgctacagccggtcgaaaccaacccgctcgcagtacagtcgctgctagcgtccggcggacatattgccggtggtgccaacaacggtaccgttgtgagccacagcacgacgtccagtgggcgcactggtacggccatgtatcagcaacagtacgcaaacgccgtccagaccgacaaccgtgttgggcaggtgcatgccaacggcagcatggccgtgcccgggtacggcgactacccgatacatcccgatgtgcaactgaaaaagctggcctttttcgacgttatggccaccctgctgaagccggccacgctggtaccgagcaacactgcccagcgggtgcaggaaggttcctacttctttcatctgacgccgcagcaggcgaacgaaattgcgctgaaccgtgacatcagcaattccgctaaaatagagcataacgtgcaggttcagcttagattttgtctgctagaaacaacctgcgagcaggacgatcactttccgcccaacattgtgttgaaggtgaacaacaaactgtgcccattgccgaatccaattcccaccaacaagccaggggtggaaccaaaaagaccaccccgaccggtcaacataacagcgcaggtgaagctatcgccgacggtggccaaccacatctctgtatcctggtgcacggagtacaaccgcgggtatgcagtagcatgctacttagtgcgcaagctgtcgtcggctcaactcttacaaaggctgaaaactaagggcgtcaaagcggctgattacactcgagcattaattaaagaaaagctgaatgaagatgctgattgtgaaattgcaaccactatgctaaaagtgtcgttaatttgtccattgggaaagatgcgcatgaccacaccttgccgctcatcgacgtgctcccatctacagtgtttcgatgcgtcgttatatctgcaaatgaatgagcgtaagccaacatggaactgtcccgtgtgtgataaaccggcggtatacaacaatcttgttatcgatggctacttccaagaggtattggtttcgacaaaactatcgagcgaagatacagaaatccagctccacaaagatggttcctggagcacgcgagttaagctaaacgattctgatgatggatcgcctagtaaagcggtgcaaaaggtcgaagttatatcggatgacattgaagtaataacgacggatccaccaaaaccgattgtatctcagacttctgtcatctcgacaaacgaaccaacgtctacgactacctccagcgaaacggtggatttgacgctcagcgactctgacgacgatgctcctgccaagcgaaagaaaatcagcgcccgcacaaacggtactggaagttcgaataatcctacatcgtcgtcttcctcctcctcgacttctgcggcaggcagctcatccactagcgccggggccgtaactcgctctaaagtgaacgaagatccttcatcgtcagtaataatgctcgactctccctcgccgccatcaacacctaacccaccgcacaacggaagtaacggtatgctataatataatatgtactttgtac

SEQ ID NO: 109 - DNA, 1861 bp, Aedes aegypti
atgaaatcggctctggccattgctttgtgcttctgcctattcacggctgctactgctgctccacatccaggacttatcagctctctgaccggtattattggaaccgttgtgaatggcacagcaactgtgatcaacactgccatcactggcacgacgaacatcatcactggcattctgactggcatcactgcaggtatcactggtacgcagacgtcccttaacactgctatcagcaatgtcggaggccttatcgctaacatcacaaccggagttgctaatgccactggaaccgctctgaccaacgccttctccaccttgatcaacgctcatgttgccttgaacaatgttgctgttgccgtcgccggaaacatctctgccgatgcagctaccgccttgaacaaaactgtctcaggcctccaaacccttgctgccaacctgaactccaccattgccaacgccatcagcgccggaatcaccggaacctctaccttcctgaacaacttgaacaacctcacgaattccattaaggctgccattcagaacgttactggaacattgagcacggtccttccgaatattgcttccaacatccagacccagctgaattccacgattgctggcatcgctggacttgtctcaaatattggcgctaaccttggcactgctgttaacaatgctttgacgaatgccaccactgctctaaccaaggctgaatctgtcctcggtacgttgaccagcaacgttctcggaaacttgacaactcaagctcaagcagctgttcaaaccggtgtcaccaacatcaagaacctggccgatgctctcaagacaacgttgaccaatgctgtcagtgctggtactaccactggaactaacctggcctcagccttgaataaccttacgagcgccatcaactcgaccctccaaggtatcactggtattctgtctggatcggttcccactctactcaacaacgtgcagagccagctgaacaacggcatcagtaccctgaccaatcttgctgcatctgttggaaacaccctcggaacagccgctggaactactctcggcaatgtagtctctgctctggctaacactaaggctgccttggccaccgttgccaccaacgtgcttgccaacgctaccgctttggtgtcggccgatgtgaaggctgccgttgcggacatgcagtctatcgctagtaccctgaatgccaccctggccaacgccgttgccaacggagcagccctgaccagtggagttctgtcaacgctgaacactttggcggccaacttgaacgctacagtccaggccgtggccagtgccgtcgttacggctctgaacactaccaccaccacgacgactaccactacgaccaccacggccgctccgacgaccgccgcacccttctgcggagtcctctgccaactgattaaggctcttggataagttattcctgttttagttaacctacatagaaatgcaatttcttcacttgtgaaagttgaagtttcgtaataaatgcgcaaaacaaattataatggaaaatatttattcctcaaattgtgtccatagtaaatcaagaaagtaaacttcctgaaatatggatatacagtttattctcccttgctcgatattcttaatttcgatatcaagttagagaaccatagcacagcgcaacaaaaatacattattgcatgtctcaaggatctgattatgtgtctctagtagatttgggattgctgaatctgatgccgttctcagaaatttcccagcacgtcacaatttttagctacaggtcgccaaagttatataatacattggttttattgatgtttacctaaaatttgaagtacattttatc

SEQ ID NO: 110 - DNA, 2037 bp, Aedes aegypti
atgaaatccgctctggccattgctttgtgcttctgcctgttcacggctgctactgctgctccacatccaggactgatcagctctctgaccggtattattggaaccgttgtggatggtactgcaactgtgatcaacacggccatcactggaacgacgaacatcatcactggcattctgactggcatcacttctggtattactggtacgcagacgtctcttaacactgctatcagcaatgtcggaggccttatcgccaacatcacaacgggagttgccaatgccactggaaccgctctaaacaacgccttctcgaccttggtcaacgctcatgttgccttgaacaatgttgctgtagccatcgctggaaacatctctgctgatgcagctaccgccttgaacaaaacagtcacaggcctccagaacctcgctgccaacttgaactcaaccattgccaacgccatcagcgccggaatcactggtacttctaccttcctgaacaatctgaacaacctcacgaattccatcaagtctgccattcagaacgttactggaacattgagcacggttcttccgaatattgcttctaacatccagactcagctgaacaacacggttggagccatcactggacttgtctcaaatttaggctcattccttggcactgctgttaacaatgctttgacgaatgccaccactgctttgtccaacgccgaatctgttcttgggacattgaccagcaacgttcttggaaacttgactactcaagctcaagcagctgttcaaaccggtgtcaccaacatcaaaaacctggccgacgctctcaagacgactttggccaatgctctcagtgctggtactaccactggaactaaccttgcctcagccttgaacaaccttacaagcgccatcaactcgactctccaaggtatcactggcattatctcgggatcggtccctactcttcttaacaacgtgcagaaccagctgaacaacggtctcagcaccctggctaacctcgctgcatctgttggaaacactctgggaacagccgctggcaccactctcggcaatgtagtctccgctctggctaacactaaggcagccttggccaccgttgccaccaacgtgcttgccaacgctaccgctctggtgtcggccgatgtgaaggctgccgtggcggacatgcagtctatcgccagtaccctgaacgccaccctggctaatgccgttgccaacggagcagctctgaccagtggagttctgtcaacgctgaacaccttggctgccaacttgaacgctacagtccaggccgtggccagtgccgtcgcaacggctctaaacactactaccactacgacgactacgactacgaccactacggccgctccgaccaccgccgcacccttctgtggagtcctctgccaactgatcaaggctcttggcaaagactttcgagtgctgaaaatcctgcctagcaacctggacgaaatcgaggacatcaagcaggtcggcaacgagtatttcttcaagaaggacgttgaagtgacagatgacgacgccgagaatgaaattgttccggacgtcgaaggggacaatcaacttccgtcctccaccaacgaagccaacaatcagttcacggaaacgttggacattgtcgtgcttccaccgcccactaaagatgcggatgtgtacgagagtgtactcgatggagcagcctctacggcatcaagtggtacgaccatcaactcggtggagcttgcgactcccacaatcggatcgcgagttctaaccaatgtcagtcaaacacaagacgtaccagatcaacaagttcaacataccacgcttggatcttcaacgatagacggaacgttggagagttatccgaacgtggaatcgaatgaagtcgaagaggaaggcgcacgggtgaacaaaaccagcagcgcagaggatggatttagtttcaacaatagaacattccgaaaaatgcaggaagcgatcctggagggtggccttgatgccgcgccgtatactacgtag

SEQ ID NO: 111 - DNA, 2242 bp, Aedes aegypti
caataaaggaatgattgatactatttttgtgaacttcattggtataaatactacttctgcaaatggttctagacatcagtttcaagtgatccaccataagaggtattcccaatcgatacccaagatgaaatccgctttggccattgctttgtgcttctgcctgttcacggctgctactgctgctccacatccaggactgatcagctctctgaccggtattattggaaccgttgtggatggtactgcaactgtgatcaacacggccatcactggaacgacgaacatcatcactggcattctgactggcatcacttctggtattactggtacgcagacgtctctcaacactgctatcagcaatgtcggaggccttatcgccaacatcacaacgggagttgccaatgccactggaaccgctctaaacaacgccttctcaaccttggtcaacgctcatgttgccttgaacaatgttgctgtagccatcgctggaaacatctctgctgatgcagcaaccgccttgaacaaaacagtcacaggcctccagaacctcgctgccaacttgaactcaaccattgccaacgccatcagcgccggaatcactggtacttctaccttcctgaacaatctgaacaacctcacgaattccatcaagtctgccattcagaacgttactggaacattgagtacggttcttccgaatattgcttctaacatccagactcagctgaacaacacggttggagccatcactggacttgtctcaaatttaggctcattccttggcactgctgttaacaatgctttgacgaatgccaccactgctttgtccaacgccgaatctgttcttgggacattgaccagcaacgttcttggaaacttgactactcaagctcaagcagctgttcaaaccggtgtcaccaacatcaaaaacctggcagacgctctcaagacgactttggccaatgctctcagtgctggtactaccactggaactaaccttgcctcagccttgaacaaccttacaagcgccatcaactcgactctccaaggtatcactggcattatctcgggatcggtccctactcttcttaacaacgtgcagaaccagcttaacaacggtctcagcaccctggctaacctcgctgcatctgttggaaacactctgggaacagccgctggcaccactctcggcaatgtagtctccgctctggctaacactaaggcagccttggccaccgttgccaccaacgtgcttgccaacgctaccgctctggtgtcggccgatgtgaaggctgccgtggcggacatgcagtctatcgccagtaccctgaacgccaccctggctaatgccgttgccaacggagcagctctgaccagtggagttctgtcaacgctgaacaccttggctgccaacttgaacgctacagtccaggccgtggccagtgccgtcgcaacggctctgaacactactaccactacaacgactacgactacgaccactacggccgctccgaccaccgccgcacccttctgtggagtcctctgccaactgatcaaggctcttggcaacctggacgaaatcgaggacatcaagcaggtcggcaacgagtatttcttcaagaaggacgttgaagtgacagttgacgacgccgagaacgaaattgttccggacgtcgaaggggacaatcaacttccgtcctccaccaacgaagccaacaatcagttcacggaaacgttggacattgtcgtgcttccaccgcccactaaagatgcggatgtgtacgagagtgtactcgatggagcagcctctacggcatcaagtggtacgaccatcaactcggtggagcttgcgactcccacaatcggatcgcgagttctaaccaatgtcagtcaaacacaagacgtaccagatcaacaagttccacataccacgcttggatcttcaacgatagacggaacgttggagagttatccgaacgtggaatcgaatgaagtcgaagaggaaggcgcacgggtgaacaaaaccagcagcgcagaggatggatttagtttcaacaatagaacattccgaaaaatgcaggaagcgatcctggagggtatacatgagggaccgaacggcgacggcggtccctacccgacgagctacgatgatgatgacgaggatgatttcgaagacgaagatgatgacagtgacgatttcgatggaagcgaccggagaggtcataaaaagtatatcaggtag

SEQ ID NO: 112 - DNA, 2475 bp, Culex quinquefasciatus
atgaagtacgctctgatccttgccgtgtgcttcggccttgttgcggtttccctagcatcgccggctccccagctgcttggtggcctcttctcgactctgttcagctcgtttgccacgacttttagctctctggtatcgaacgtgcaaacatctctgaacagtaccatttcgacgattggcactcttcttggtaacattaccacgaatgtcggaacggctgtgacgaacatcggaacgaccctgaacaccaccctgacgacggccctgtcgaatgccaacgccaccctggttgcggcccaaactgccctggtcagcgcggccaacaccacagtcacgaacctgtccactgccctgcagactcgcctcagcacggccgtcaccaatttgaacaccctggtcggaaccctgaacacgacccttaccggaattatcgccaacggaacgacagtggccagtaatgccgctaccacgctgaacaacattaccagcgcggtcaatacggccatcgcgaacgtgacgtcggttctgtccacggctgcgagcaccaccgcgaccaccggcaccggtctgtttggttccatcgttgataaatgtgacgacagcagactctgcgatctgtatttcaaaacacaaacaaaatatagtattcagtggaactttattcataatccattctatcccaacaatcctccgaacaaattaagcccggtgctgaacagtccagttattccggtgattccagtgttgatcgcagtggccacattcgtcactgctggggccaccgtagcgttaagggccgagatcagcgtctgtgagggactcgttccggcggctaggaccgaagcaagggcggtgttcaacgcggtgaccgccgacgttagctgggttgcttgggtggacattgccgaggtgagggccgttgctccgttcgccagcaacgtggagagtacagtggatgcggctgttagggcggtttgggcgttggtcagcacagtgctcagcagggatgacaagccggtggtggcggtcgttgctgccgtggtcgctaagctggcgaggaacgccggaacctgggtaagagtggaagcgacctgtggcagcagtgtggacagagtagatgagagggtgctgagtccagaagtgagtcccgtactaagggcggtttggaggggggaggtcagattggccacgttggcagttgcattggtcagggcatcgatcaagatctgcggaacggtgcttccagcggacaagactgacgccagagtagtgttgagcgcggaagttgccgttgccagcgtggtggccggaattgtgagcgccgttgtgactccgttctgcagggctgtggagagcagcgtggtagcgttctggagtaccgtctgggcgccggtcattgcggtactaagcaaaggcgatacgagtccagtcaatgcggtcggaatctggcccagggttgtagtgacttgtggtatcaagcttgtcaacgtagtcgtcagggtgctgagaccggttgttagtccagtactgagggcagactggataggtgaggtcagagtggccaccagtgacgttgcgttgttcagtgcgtcgatcagggtttgcggtacggttgctcctgcggaaaggacaccagccaaggtagtgtttagcgcggaaaccgccgttgccagtgtggttgccgggatggccagcgccgttatcaagttcagcggtgcactagctccggcggaaagaaccgtacccaaggcggtgttcagtgtggtaactgccgttgtcagcgttgtagcgggagcggactttcgcgtgctcaagatcctccccagcaacctggaccagatcgaggacatcaagcggatcggcaacgagtactacttcaagaaggacgtcgaagtggtggacgacgcagagaacgaaatcgttccaccgtcctccaccaaaaacgacaccaacaaccagttcacagaaacgctcgacattgtggtcctgccggctccgacgaccaaggacgctgacgtgtacgaaagtgagcttgacctgccggtggacagcaaaaccacagtcaacgtgatagagctagcaactccgactgtagtgaccggacaggagccgacgcactcaacggttcttgctcaattagacgtcaaccagacggaatcgacggccagcgcgtcaacacccgcgctgaccacgctgggtaatccacgtggtgatccgacgcccggcgtcgagtcaaacgaaatcgagggcgattcaaaacccaacaaaagtagtggcgaggatggttttagttttaacaataggacttttaagaaaattcaagacacggtgctggaagaaatcggtgcaggtcacagtgaggaacggtaccccggaagttacgacgatgacagcgaggacgacgatctggaggatgacgacgaggacgattacgaggagagcgaaaaacgaggccataaaaagtatatcaggtga

SEQ ID NO: 113 - DNA, 1478 bp, Aedes aegypti
ctggaaatttttatcaaaaattagtgtttaaaaatcacctttttaatagaagtttgtaccttgtggtgtagaataatggcctcaaagccagtcctgagcacgaagactccaataacggagctgcaagagctgtgtgtgtccaaaaaagcgccgcatccgctgtacacatttaccggtgaggaaatcgacggaggaaacccgaattccaaagttttcaccacttcggttttggccctcggattcaccagcagcggaattggccggtcaaagaaggattccaaacatgacgctgcctataagttgttgaaattgctgttcgagaaagggctgagcgatattgacgtggacaatgatgagcactttttggcggtcctgtcctcggataaagtgaccgaagtgcgggacatttgcgtgcagcggaacttcgagatgcccgaattcaactgtgtccgcagttcgggaccttcgcatgctccagagtttgaatatgagtgccgcatcggagcgattgtccgccggggaattcacaagacgaagaaaggggccaaacaggcagcgtgcaacgagatgattaagacgctgcaagctatgccagtggaggacagcgaaatgcaggtccagccgctcaatctggccgccgagatcgatttgaacgaggatgagcacatcatacggacctaccgggaactcatcaactcggacatcaagaaaaagctgggcgtaaagattgcggaccgacatcggttcttcgaagaacaggaagaagcgaaaatttccgccgcccgacgaattgctctggacgaaacgctgaacgtggaggacaaatgcaccctgatccccaaggctctgggactgaaattcgaaatgaaacgagacaacagcgatctggtaacgatcgaaggaagaaaactgttcacattcgaattgcagaattcagaatatgattgtttcattttcggaaagggagacaagttttacgagagcgtctacaagtatcttaagaacatgcttaatttcgattacattgattgaatgcgatgtgataattaatgcttcaagcagatcgtttattcggcttactacactgaactggattagaaattacattgattgataacactttaattttatcgtccccttacgccatcggtgtaaggatcgattagttgataaaaatgtgaatacaaacaatatgaacgtcattgagttttattaatggttattactcttgctttttttcttcatccgatttctggtcctctggtttggtctcctctattgcgtcctctgcctttttgttgccgctgtcgatgctttccttcgaatcgctaccaggaaccgttacttcgctgctggtagaatcgtctgatttcttggattcttccgctttcgacttatcgacggaatcctttgccgattccgggtccttatcctttgatttagcatccttgcggcttgagcgatcgcgagagctgcaa

SEQ ID NO: 114 - DNA, 3533 bp, Aedes aegypti
gaagcactagtgggtttagcaggagcaagatgattcacggacatcctcctcagccgccacagcagcaaccgcatccccacatgggtcatcctccaccgccagggcccgccacgcatcagattcctccgccgccgccacatctgacccatcttacgagcgttcctccgccgaatgtacctccgcagcagcagcaaccaccattgccgccaccaccacaacagggccgagaacaccctgggccacgaatcaacaaccgacagcaccatcatccacgtgttccggccggcggggatcatcaccagtcgtcgatgcccggtggtcctcacatgccattgcagagctctaggaaacctccgtcacaacactatggcgccgccaatggcatgggaccgggcagcggaatgggatcgaagcaccagcaccctggtggaatgggcggccacccttcgaaggccctgccgtacggttccagcagtagcagtagcaacagtagccatcaacaccatcaccagcagccacaccaccatcagcagcagcagcagcacaatcaccacagccatcaccactcggggcatcacaacccggcggcgattccggtagtgtcggccgccggtcccggggcgtccaaagctcgcatgattccatcgcatgaacccaaaaacatccacaaccacagcaatacggcaccaataggtaacacagcgaatgcaatagtggtccatcaggcggacccagtccaacagctatcgggaggaatctcctcctcaaccgccactaccacagtcggaagtaccatcgccacccacggaagcaccagcaatacaaccaattcatcagccacgaacagtggtagtcttcctccaatggtaacgggtggtagcggtggcggaggaggaggtgttggaactaccgccatggcagcaaccaatgccaccgtagtggttctgggcagctcttccgatagcgccatcctgaaagattcatctacaacagtacagtcacagtcgctactgctgtcgtctgtaccagaaaccttggcaaacactaaagagaaaacaccaatgtgtttagttaatgaattagcacgttacaacaagatccagcaccagtaccgcctaacctgcgaatcgggcccggcccacaaaaaacgcttcaccgtcacgctcaagctgggcgatgaagaatatacggccgaaggcccgagcatcaagaaggctcaacacagtgctgcccacgaagccatcggagccaccaaatataagcatccaccggccaaaaccaatcgagccaaagcgggcggaaaaaccaacatcggtaacataactccgacggtcgaattgaacgctttggccatgaaacgtggggaaccgacagtctacgaaacggaacaagtagtagcggcaccaaagtataccgttaacagtcaccctcctggggctcccaatgctcctccacagggtggaggtggcggtcacaacttcttctcggctccacctcctcactacggcggatacaatcgtagtaatagcatgtacaatgctcctccaccggggagcgtaagatacggtgctccaccaccaagttccttcaacagacggaacaccatgggtggaaaaccggactaccacagtcggggatattactacaatcagcacgtaccgcctatggccccacccataccggaagtgtacaaagtgaccctccacgtgggagagcggacatttttaggggaaggacacacgctgcaagcggcaagacatgacgcggcggctcgtgccctggaggtactgaaaccgctgacgccggatacggccaatcccgtatcggacagtcacaacacatcgatcgacagcgatgatcccaactccgatctaaaatctccgatctccctcgtgcacgaaatggcactgaaacgcaagctaacggtccagttcgaagttcacggcgaaaaaggtccacctcacatgaaggttttcacgacgctgtgcaaggtgggcagtatcgttaccgaaggcgaaggcaatgggaaaaagctttccaaaaagcgagccgcagaaaagatgctggacgaattgcggaaactcccgccggcttcaccggagaagaacacccgtatgctgctgaagcagaagcgcaaggtaccgctgccgaagaaaaagactcgcaacctcatcaaagagaaaggcgacgaagacccgaccggcatggtcaatccgatcagccgactgatgcagatccaacaagcccgcaaagaaaaagaaccagtctacaccctagtggaggagcgtggcgttgcccggcgtcgggagttcatcatggaggtgtcggccagtggcaaatctgccaccggtataggccccaccaagaagctagccaaaaaagaagcggccgaaaatctgctggtgatgctggggtatggccggtcggttgctggtgcgggatcaccaaacaaggaaaacatgtcgggcagtgcaaacgaagtggtggtgatggagaaaccgccggcacggaagatcgtgttcaatgagtcgggaggcgagcagaggggaaaggctcaacagcatggagcggccgggcggcagattgtgcccggagtgttgcagttgaattcaggcattgcaaacaaatctgccaccggaacgccgccaaaggaacacccccaggaaagcaacgtgtcgatcgactccggcaacgcttcttcgaacgcaaccatatccccaacagccgtcaactcgtctagtacttcaaatgtggcacctagtactgcacagacacctgcacctgctcccaccacccttaagagcagttccattgcggatgtgggtcctatgaaaaagcagctcatgtatctggctcagctgttgaagtttgaagtcatgttctccgactttcccaagggtaatcacggtgagtatctcactttggtaactctatcgacggaaccaccccaactgtgccacggcagtggtgccagcttggaagagtcgcacgacgaggcggctcgcggtgcgttggaaattctcagcaagatcggattggacaatgtaaagccaaagggtagcagttccggcggtaatgcggatgaaagtgagaaacccaatgatatcaattcgaaactggactacagagttagcaagcgcgtgatttcggatgtactcgggatatatcgagaggaaatttccaaaatgaaagacgacagtcgcagactgcaggagagaaacgacaaagttgatcagagtaagaacgaagcacatggttacattagagattccgtggtagacttgctgatggaatgtttgaaagatttagttcttgataagttagaaaaccatcgatgttagttattgtttattagtgtaactctttgaaaagtattaattcgtttttgtttgttatgtgtatcgaattcaatgtttatggtttgtcattttatatgtttgttttataaatatctacatattggtgcatgtcttaaatttgtgtattgatttactcttttctattataaataatgattgaggtaatcaaagttt

SEQ ID NO: 115 - DNA, 1090 bp, Aedes aegypti
atgggtagaacgaattcgccgtcaaatgaatgctgtgaaaacggggacaacgccttactaaatggctatgtgagtgcttcgccgggagaatcgaatcctcgtccagttccaacgaatgatgctctaccgatagaggaagccttcaagattgcgttgaccggtaagagcaatacgaagaagatgccagtgtcccttctgtacgagctgttgagtcggcgtggaatcactccgcaatacgatttgcttccgcgtgagggagcagcccacgaacaaaccttcagctaccgggtatcgtacccggatggagacgccatcggaacaggccaatcgaagaaggaggcgaagcatgccgccgctaaggccctaattgacaagatgggcatcaacgatagcgcgaacaaacctgtcggcaagaaaacgccgatcacggttctccaggaggttttgacgcgccgtggaatctatccccagtatgacttcatccagcccgatgcagcagtccatgatgggacgtttcgctatagagtgtcgtaccaagacaaggaagccatggggaccggcaaatccaagaaggaggccaaacaagcagctgctaaatcactaatcgacaaactggccggtgttgctttctgggatacccattcgcagggattgaactccagagaggaaaccaaacaagacgaggacgcagaaccttcagcgtctagccctgaagtatctttactgtcccgaagccatgacggcgtgccggaagggttcacagacaaagcgaaaggaaagcgtaatcaacatacccaggtggatatgttcgtatcgagaaagaagcagaaagcaggaaaccaacgtgagttgaccaatgccactatttaaatggcatgtagctggtacacgtgacacgtgagcgcgaaatggttagcttgcggttgttcgctgtttcttgatgcaatcgtaactaagggaacttttttttatttcttcgaaataagactttaatttgttttataatatgttgaaacataatttgttcaggataagacggtttacttcttcagttaaactttgcaacgcaaatacatttttgagttcatat

SEQ ID NO: 116 - DNA, 3082 bp, Aedes aegypti
ctccgatgcgacccaaaactgtcattggcgtcaccttttttcggtgctgctggttcacgttcgtttgcggtgcagtgaaaattgtgaattttaccgtgaaattccatcggccgtgattttacaacacccgatattagtgcattggcctctcctgcaacaggaaaacatattttctccgagatgagtaagacggatttgccggcggtcgaggatctgaacggactggtatccggtgacaacggaaaccccccggtcggtcaaccgaatcttaagcgccccgttcgggtggcgaagaaatcggtgagcaagcaggatgctttgccaatcgaggaagccctcaagaccgagctgacgggtacgaacaacatgaagacaccgatctcggtgctgcaggagctgctgagtcgccgcggaatcactccgcagtatgacttgatccaggtcgagggagctgtccacgagccaactttccgctatcgggtctcgtaccaggacaaggatgccatgggtacgggcaaatcgaaaaaggaggcgaagcacgccgctgccaaggccctgatcgataagctggcaggcaatgccttcggcgatacccaaaccggtgggttgaacatcaaggccgaagccggactcgacggcgatgacgaaccgaccggaaatcccatcggctggctgcaggagatgtgcatggctcgccgctggccgccaccaacctacgagaccgagatggaagttggactgccgcacgagcgccagtttaccattgcctgtgcggtgctcaagtaccgtgaggtgggcaagggcaagagcaagaagattgccaaacgccaggctgcccagcggatgtggcaacggctgcaggatcaaccgctggaaccgaaccagatcatccagatgttggacgaggagggcaatgaagaggtcacatgcttgaatgacaaatcgatcgactttgtgcagatgctgcacgagatcgcaaccgagcaacggtttgaggtgacctacgttgacattgacgagaaaacgttgtccggtcgcttccagtgtttggtgcagctgtctacgctgcctgtggccgtatgccacggtagcggaagcacggccaaggaggcgcaaactgcagcagctcgcaactcgctggaatatctgaagatcatgaccaagacctaaggggtgtaacgaggcatcatgagaacggggctcggtcgataaaatcatattctcgcgtagaagaatagcaaaggcaaaaaagaaagaaaatcgtgttgacaccaaattttccaaatacatcattgtaaaagttcatttaggcaatacctggcgcaacaaacgacgagaaatgaactatttgtgtatcgaccaaaggcgagccgagaacaatttgtctggagcgcacctagcgggatcaagtaaataattgtggaacaccatctcccgccaacaacatgattgaccgcgctccgatgggacgccagagggcgtcaataattcttgaaacaaacacatttttactctaggtatttgtcaacgtttatctatgttttattattttgatgtttttttttgccgtaatgttcttctctttggagaatactgacaaaggtgttttaccttttacggtgaagattgtatttctacattatttttgtttgtttggactttgtaaatttttttattaggcataaggttcttacgattttttttcctctgatgtattgtgtactcaaaaatttttatcgaatcagattaactaaatacataaataactagtatcattatcaagcatttaatcgatgaaaaaatatgtaaaactactcttagctacactgaaaaagcaaaacgtatagcagataacgcatacttgaaacatgagttattctaccagcgttttaaatgcatacgttacaccatttctcaattgctatagtgcaacgaaaatcaattttctccaattgaatgaaatgaaatctgatcgaaaccacacacactgaaatggttgtcccttatgaaataaataaaaaaaagatcaacaactcaagcgaaccattcgagttatttatgtgtatagtgtaatacgaacttggcaaaacaataaaggtatcataatcgctaaatcttggatcaaacaaagaaaaatgattggaatacaacgcagttgttacgcaaataacaaacaacccgaagttgaacggaacctttctttcgaattacaaatattggaagcaaaaatgtgtgcgtattgaagccaaccagatgcaccagatgtcgcgccctccgttttggcaattagccaaacagacaaacggagagtacatcttgcattaaaaaccataatacaagctatactttgcatagaattagtgggttttattttccaagaaaatatacaacacatccaatgtcaagttactctataatagcatatagaatacagttttgtctaggttttcagctttttttttaccgcgattgaaaaatatggattacaaccttgattaatcgatcattacaattttccgttttcatctatacatgtaacgatatgaaaaataaacgttgctttgtaataattattggaaaattgcatcgtaaatgtatttgctgtcattgagagtattgaagtatcaagtcaaagaaaataaggtaaaagcacacattacttgaatctaacgccacgtaaatgaaagcaaaaagatatatgaatacaattagtgggattttttcgagcatctaactattattaaagcttaataaaacataaacgagaaagaagaaaaaacagcatgaaggataaaagtcccatacttgtaggaaaatgggcattattttaatgcaaagtatagaggttgtaacaaatactgaaacaaaacatataatttcaacggaatgatgaaaacaatacatatatgaatgtatcaagtgtgcaaaatatgctttttcgcgatgtaagtcaataccgtttgaaactgttgaacaaaggtagtattgctgtttggaaaaggatatttcgtacacaattttcttgtcttgtagttttcttgtatccaataaataatcaacacatataggttagcaaaggcaa

SEQ ID NO: 117 - DNA, 1160 bp, Culex quinquefasciatus
gaaaaaatcgaatgaaaaactaaataatttgaaaatcaagcaaaatggctggccagtctgcgctcggtgcgaaaacccctgtcacggaactgcaggaaatttgcgcccgccggaaggttccacttccgatctacgagagtgccggcgaggacaactcgacaccggcgaagattttcagcacctcggttacggcgcttggccagacttgtgtgggccacggccgctcgaagaaagattccaaacacgctgccgcgctgcacatgctgaaactgctggccagccacggcgagagtgggatcgacctcgacgacccgcagctggccatttcgtcgtcggataaagtcatggaggtgcgcgatatctgcgttcagcgtaatttcgaggttccagagtttgagtgcgttcgaagttccggtccgtcgcacgcgccggagtttgagttcgaatgtcgtgtgggcaacattgtccgacggggcgtgcacaacaccaagaagggggccaaacaggtggcctgcaacgagatgttgaaaacactgcaagcgatgccggtcgaggagaacatgatgcaggtccaatcgctggaccaggcggcaaagatggacaccgacgacaacgagcacattatccgaaactatcgcgagtacaaaaactcggacatcaagaagaagttgggcgtgaagatcgctgaccggcacaactacttcgccgagctggaggaagcgaaaattgacgccgcccggagcttggccatggacgagacgatggacgtgcaggaaaaatgtgcgctcattccgcgggcactcgggctcaagttcgacatgaagcttggggacagccagctccaggcggaaaacggccagaagctgtactcgttcgagctgatgaacagcgagtacgattgttttatctttggactgggcaacgagttttacgagagcgtttaccgatactttaccacgatgctgaatttttctttcaagcagcgctgaaaaatgctggttcaaactgttttatttaagtattttactgcttgtgttatgtttcttgctagcagaagaattgcacaataacactgtaagcaaggatatcaacttttgtgacgatttattaatcgatgtgattatcaaatatatccaaatatgatttgagctaattcgaaa

SEQ ID NO: 118 - DNA, 3307 bp, Culex quinquefasciatus
ttttattttagcaaaaaccagcagaagcagcggaacaacccgtattatccgttcaagtagggccggaaatccctagaaaatctttctttactgtttgccgacgattccctgaccggaaccggatggagttgtgaacccaacagtagtgaccccgccgggaaagtggattgtttgcgtcgtgcggaaacccaaagttgtcgtcgtcgtcccgggtgagaaaaaaaaagttgtgaatctcgcgtgagtgtcgtaattttcccgtgatagattctcccagttccgtgggaaagaggtggccatttgataagtgtttttatctgaaacttccgcgtcacgtgaaaccgttatcgaagaaggaaccagctgagttggcagagtgattctctgttattgctgaacaaccacttttgctattgcaaactgagccaatagaagaaggggctgttccgcgtgtaagtgaaacaaaacagcagccgccgccgccaggatgatgcacggacatccagccccgccccagcacatgggccacccgccaccaccgccgccccatctaacgcatctgacgagcgtgccaccgccgagtgtgccgccccagggaccacggatcaacaacaaccgacaccatcatcatccgcgtgtcccggccggcgaccaccaccagcagaccttgggaccaccccacatggttccactgccccaccagcagcagcagcatggtggcagccggaagccacactacggtaacaacaacggaatcgtgtccggcggcggaatacctcccaagcaccacatgggcaagacacagcaaccgtacaacaacagcaacagcggcagctaccggacgagtggccacggggtacatcacagcgccggcggcattccggtggtgtcggcggccggcaatctgggcaccaaaacgaggatgattcctgcgcatgaaccgaaaccgatccacaatcacaccaacgtggccccaccggcaccagttccttccagcaccgccgtaccaaccgtagcgcatcacgcatcacctgcagaatcttcagcgcagcagcagattcccggagcgccgtccgtatccgtgaccgtcacgaccgcaccgcagccggcaggtccggtcacgacaacgaccagcaacaatgccgttgtcggttccgtgccaccacctgtcgtcacgtcggtgccgccaccgaccgaaaccgcggaagattcacagcaaatgcagccaatgtcccagctgctgtcgtctgtaccagaaaacttggcaaacactaaagagaaaaccccaatgtgtttagttaatgaattagcacggtacaacaagtgccagcatcagtaccggctgaccggagagtcgggcccggcgcacaagaaacgcttcaccgtcacgctcaagctgggcgacgaagagtacacggcggagggtccgagcatcaagaaggctcagcatagcgcggcgaacgaggcgattgccgcgaccaagtacaagcatccgccggccaagattaaccggatcaaggtcggcggaaaggcaccgatcgggaatattacgcccaccgtcgagctgaacgcgctggccatgaagcggggcgaaccgactgtttacgaaacggaacagctggttccgacgctgccgcctcctccgcatggcaactttttcacggcacctccgccaccaaactcacactacggtgggggtggtggcggtgggggctatcatcaccgtactaacggcggcatgtacagcaatccgccacctccgggtgcggtccggtatggtgcgccggcacccaactcgtacaatcgtcgcggcctgaagccggactaccactcgcgaggctacctgtacaatcaccatcatcacatgcaaccgatggtccaccctgcgccggaatcctacaaggttacgctgcacgtgggggagaggacatttttaggagaaggcatcacactgcaagcggctcgccacgacgccgcggcacgtgccctcgaggtgctgaaaccgttgacgccggaaacaaccggaaacgcctctggtggcaactgtcacgacacttcgatcgacagtgacgatcccaactccgagctaaaatctccaatctctctcgtgcacgagcttgctctgaagcgcaagatggccgtccagtttgaggtgcacagcgaaaagggtccgccgcacatgaaggtcttcacgacgatctgcaaggtgggcaccattgtgaccgagggcgaaggcaacgggaagaaaatctccaaaaagcgagccgccgaaaagatgctcgatgaactgcgaaacctcccgccaacgtccccggagaagaacgtgcgacctccgctgaagcccaagcgtaagctccccttgccgaagaagaagacccgcaacctgatcaaggaaaacggcgaagaggatccgctggacatggtcaatcccatcagccgcctcatgcagattcagcaggctcgcaaggaaaaggaaccggagtacacgctggtggaggaacgcggcatggcccggcgtcgtgagttcatcatggaggtgctggccagcggtaaaaccgcctcaggcgtgggtccgaccaaaaagattgccaaaaaggaagcggccgaaagtttgctcgtgatgctcggctacggccgatccaccgtcgccgcgaacgtctcctcacccaacaaggagaaccagtcggcgaatgcgaacgaagggggtggggtcgaaaagaagcacggcggacgtaaggctcagtacaacgagggaggagcagccaaacacggtggcagcgctggccgccagatcgtgcccggcgtgctgcagttgaactcaggcgtctcgaacaaaaccaaccaaccggttaaggagccagcgcaggacgccatcgacggtggtgatatcaagccgattgccattagtgtgacgaagccggttatctcaactgcttcgagtgcgacgacaaatgttgcagcgtcgccgccagcggcaaccaccacctccgccacaacgggaggcagctcgtcgaatccggacgtcggtagaaagaaggagcagctcatgtatttggcgcagctgctcaagtttgaggtcatgttctcagacttcccgaagggcaaccacggcgagtacctcacgctggtcacgctgtccacggatccgccccagctgtgccacggtagcggcgccagcctggaggaatcgcacgacgaagctgcgcgcggtgcgctcgatatcctcagcaagatcgggctggacaacgtgaagccgaagggaagcggcggcgcggtcaccggcgatgacagtaagtcaaagaagtaa

SEQ ID NO: 119 - DNA, 1173 bp, Culex quinquefasciatus
atgagtctgcttccggaggaggatctcaacgcgtatatcatgcagacccgcggcggcgctcccggagatatcctcggggacaatccgcccctcgggcagctgaacaacgtgcagcacaagcggccccgtggaccgaagaagggagcggccacggctggcaaacagcaagactcgctacccattgaggaagcgctcaagacggaactgaccggttcgaacagcatgaagacgccgatttcggtgctgcaggaactgctgagtcgccgtggcattacgcctcagtacgacctgatgcaggtcgagggcgccgtccacgagccgacgttccgctaccgggtttcgtaccaggacaaggacgccatgggaacgggcaagtccaagaaggaggccaaacatgccgcggcgaaagcgctgatcgacaagctgaccggatgctccttcggggacacaccggtgggcggggtgagcgtcaagagcgaccccgaagccggcagcggtgacgacgaaccgtccggcaacccgatcggctggctccaagaaatgtgcatggcccgccgctggccaccaccaacgtacgaaaccgaaatggaggtgggcctgccccacgagcgacagttcacgatcgcgtgtgctgtgctcaagtaccgcgaggtcggcaagggcaagagcaagaagatcgccaaacggcaggcggcccagcgcatgtggcagcggctgcaggaccaaccgctcgaaccgaaccagatcatccagatgctggacgaggagggcaacgaggagctgaaggcggccagcatctccggacggtacgccggcctcaaggatgtgcgcatcccgagcctgacgacgggccacggccagaaggtgtcccagttccacaaggctttgaagtctcgcagcggcgaatctctacgtagattgcagaacacttgtctgaacgacaagtccgttgactttgtccagatgctgcacgatatcgccaccgagcagcgcttcgaggtcacgtacgtggatattgacgagaagacgctgagcggccgcttccagtgtttggtgcagctgtcgacgctgccggttgccgtttgccacggcagtggtgccacggccaaggaggcacaggccgccgccgcccgcaactcgctcgagtatctgaagatcatgaccaagacctaa

SEQ ID NO: 120 - DNA, 985 bp, Anopheles gambiae
cggcagacccatgtccaaggcggacatattgaagggcaaaatgcccattaccatgttgcaggagatgtgcttcaaggtgaaaagtaccctgccgatctatcagtttctgggcgaagaatgttcaccccacagtgtcaatgtgaagctgttctcctacatggtgacggccctgggaaagcaggctacgggtgttggtagatcgaagcaggaagccaaacacgaatccgcctggcaactgatccggttggcactggagctaccggccggcgaggaagacgagatggttgcgaccgccgccgaggagcgtggatcgctggcggccctagagattggcaccgatcgcgtcaatcaggttcgagacatctgcattcagcgtaatttcccgttgcccgaaatcgtgcaggtgcgcagctacggcccgtctcatgcgccggtattcgagttcgagtgccgcatccgggagattgtacgacgcgggtcgcactccaccaaaaagggagccaagcagattgcctgccaagagatgattaaaacactgcaatcgatgccggttgaggagcacagcatgcaggtgctttcactcgatcaggctattgaagaagcggaggacaacaacgagaatgtgataagaacgtaccgcgagtacacccaatcggacaataagaaaaagcttggcgtttccattgcggacaggcattcgtttttcctcgagctgccccaggaacgaatcgacgaggcccgccagctcctgctgaatgagaatgaaacggtgcgcgaaaagtgttacaagattgcaacggcgctcgggctgaaggctaaaatcacgatcgccaacagcaatatgcaaacgatcaagggcagcaccatgagtaccttcgaattggtaaacccggactatgactgcttcatcttcggcgagggcgaattattctacagcaatgtggttgattattttgttcgaatgctcaattgtaaggtaggttga

SEQ ID NO: 121 - DNA, 1152 bp, Anopheles gambiae
ccgatcgaggaagcgctcaaatcggaactgacgacgaacaacatgaagacgccgatctcggtgctgcaggagctgctcagccgtcgtggcatcacaccgcagtatgatctgatacaggtggaaggggcagtgcacgaaccgacgttccggtatcgtgtttcgtatcaggataaggatgcaatgggtacgggtaaatcgaaaaaggaagcgaaacatgccgctgcaaaagcgttgatagacaagctaacgggatcgatatttctcgaccatcccgccgtatacatgaacgtccacaagccagacactcaatttcactcttgcagagtcgtaaatgtgcacaccaacaataacgtcaacggagaggaggaaccgaccggcaatccgatcggctggctgcaggaaatgtgtatggcccgccgactgccaccgccaacgtacgagacggaaacggaggaaggattaccccacgagcgccagttcactatcgcctgtgtggtactgaactaccgtgaggttggggaaggcaaaagtaaaaagatcgccaaacgacaagcagcacagcggatgtggcagcggctgcaggaccaaccgctcgaaccgagccaaataatgcagctgctggacgaggaaggcaatgaggagactggctatgccggccgctatgctggcctaaaggatgtttgcataccaacactcacgaccagccagagccataaggtgtcccagttccacaaggcgctcaagtcccgtgcgggcaaaactttgcagcagctgcagaacttaagcctttgcgatagaagcatcgacttcatacgcttactggccgacatagcgaaggagcaacggtttgaggtcacgtacgtggacatcgaagaaaaggcaggcaacggtaaattccagtgtctggtacagctatccaccatgcccgttgccgtgtgccatggtagtggcaattcaattcaggaggcacaatcgtacgcggcgcggaattcgctcgagtatctcaaaataatgaccaaaccttaagcgggttcaatagtaattgcgagtaccgcgtttactagtccttgccggattcggagtgcgctacacactggcctagacactggctagggtggaagcgcgcgcgcgcgttttcggtttccgttttaa

SEQ ID NO: 122 - DNA, 5912 bp, Aedes aegypti
ggttagcaaaatttaatcgtgctaggccgtaccgtaatcgaattttcattcgtggtttcttccgtgaaaatatcgttcattgtttttcgctttcgttcagacgttgtgccagattgttaaagttcgaaaatagtaattaaccggcattgtttgcggttcaatttgcggaaaaaatagaaaatttctcatctcttgttgactccattgaatgtatccaactgaaccatcatggatatgattatgccacagcaagacgatttcatcccgcgggactaccagcggacgatgaagacaatctgcatgcagaaaaatacaatcatctacttgccgaccggagccggaaagacccatatcgccctgatggtcatcaaggaaatgggcaaagatctggataagccattaactgaaggtggtaaaaggacgttttttgtcgtgaataccgttgcattagctaagcagcaggccgaattcctgagtcataatcttacctacgacacatcgatctataccagtgatcgaaatgtggatgcttggaaacaggacaaatggctggaagagttcgcgaagtaccaggtcattgtttgcacatgtcaaatattgttggacgtgctgaagcatggttatctctcggttaaacacatcaacttgcttatatttgatgaatgccaccatggtgtaggagaacatcctatgcacgggattatggaacaatttctgagggttccaaagtctgaccacccacgtgtaatcggtctttctggaatgttactctataaacagattaaaagtgtcgccctagtatctccagaattggaacgcttggaaaatacatttaacgcgacaattgctaccgttgggagttatgatgctttcaccgaggtctgcaaattttcgacagatcccaatgaacttttggtgtcttattcaacccttcgactgtcacctgtgatggctgacatcgtgaacaacatcaacgctttcagtcaaacgattgaagaatttcaccttccaaaatatttaaatcaaaataaagccctcctaaaagacagaccaaagccactgaaagagatccgaaaactcttcacagagttgatttatcagcttggcgatactggtctttttgggggatcaatagctttacttggtttgatagtccaatttgagctggacaaaaggcaatcggatagttcaatgctaagactggcgttgaggtcgtgtattactttttgcgaaagcctgaggcatcagatcgaaaaattaatgagtggtttggacatgaagaccaaattgactaagttcagctctctgaaggtccgccaattgatagatcagctggaaaagttgtacgaagagaatcgtgataaaaaagcgaaaacgctgattttcgtccagcgacggttctcggcgaaagttttgtaccatttactgaaaatttacttcgctgagacggaagacgccaaccttattgttccagatttcatggtgggcaacaatggttccatgcccgaatcgattgaacaaattttgagtgctaaaaaggatagaagggttctcgaacggtttaaaaagaatgaaacaaacgttattgtaacaaccaacgtgttagaggaggggattgatcttcaaatgtgcaacactgtcgtcaagtatgaccatccgcaaacatttgcgtcgtatcagcagtcaaaaggaagagcccgtatgaagaacagtcagtatatggtaatgctggataacgaaaatcgtcatatcttcctggagaaatacagactctataagagtattgaagaggagttgcgaaggtgccttatcggcaaaacaataaaccggccagaccccctcgatgcggacgtccacaaagagctatacaatgagatcattccgccgtttttcaccgccaagggtgccaagctggatgctctgtcggccatacagctcctgaaccgctactgcatgggaatgccgagagatgcatttaccaatactaacgtcacttgggaacggatcgatctgaaggacggcagaataatagtggaagttttgttgccgcttcagtccaccgtgcgagaaaaaatctccggcaatcccatgcgcaatatcaagttggcaaaacgatcagcggcgttcaacgcgtgccgaaaactgtatgagaataaggagctgaatgaacatctaatacccatagactgcaaataccagcttaacaatttgaaagatgtgtatttccgtcattggaaggattttgatgcagacctcggcaaactagcaggcacccaaaagtgcatacgaacgcacgctatccagtatccaaagcaaacaacagagtgtttcccacagccgggcaaaccctgttacatctacgttctgcgaattgcagctgggtttgcacaggatccaacaaacgataatgtcaacattttccactctttgtatagctcggagaataattttggattaatgactacgaaacctctcccggccctagcaaagatgaagttctttgtgactttgggactaatcaacgtacacatagaggagactcccatcgtgctgcctaacgggggatccgaaatagaacttgctctactgagacaattccatgttacagtcttccgcgacgtgctaaaactgtggaaggaatttctctgctgcgattacgacaacgaggaaaacagttttctggtggtgcctttgaaaaattctactcacctagactggaaactcatccgagaatttcaaaatttgagcgaaccaccttcggaaatttcaacgatagctcgtaacaagatggaattcgaagccgataagtaccgacacaaggtcattttaccgtggtacaagaacaacaaggaacagccatacgttgtcactatggtgcatgaacatctgactccggagagtcctttcccaaatccggagtacggttcctacgcgaattatttcagccaagcttaccatttggcagtggttaagccagatcagtttctcattgaagtgaaaggcatcactagttacctcaaccggttgaaccccggagtggaagacgacggaaagagcacccgaagcaaacattggcgttttaacgaaattctgattcccgaactgtgtcacaactaccaatttccagctgactactggttgaaggccaccctcctgcccagtgcacttcatcgattgcactatcttctgttggcggaaaacattcgcgtggatctggcaacgggtgcaaatgttggctgtttggagaatcacacgatcgaagacgtggacgttgagtacaaggagcggaaaggaaagcagttggaggaactacagctgatggaatttgaagaagatgaagacgaagacgacgaatttgatttggaagaagcgaagaggtcattggtggctccagagaatttgagcgagttggcacgaaaccaaatgtgctccattaccggcgatatacctctgccgtggcaggaggacgaggaaccggtggatattgagcgaaactgggatcaagtgtcgaaacttgatctggactactacaatgtctttgtgaataagttttccgatctgtcgatgcgtgaaaaggccgcagagcgtattagtaatgcatacacgtcagccgtatatagacgtgctgctggtagtccgaagcgagaagctatggcaatcttggatgtacccgtagaccagaaatttgccattaaactgctccagttgaccccagcaaatacggtcaatgtcaatcttcaacagaagaacataatcaaggcattgacgacgaaatcatcgtccgatgtttttgacctggaacgctacgaattgttgggcgatgcttttttgaagttttccatctctctctaccttgttaaatatcacaaggaatggcacgaaggcttcctcactgcagttaagggccaaattgtaagcaatcgcaacctggtctattgtgcgataaagtacggactacctggaatgctaaaaattcacaaattcgatcccaaaaacgactggcaaccacctctagcaacggttccgaagaacatcaaacgaacgatgcaatctgtgaatcattccgcccgagtgctatatcggttgaccttaacagaggaggaaatcaaaaccggtgtggtgacagcaaagaacagtgatgattttattgctcagcttgagctgcatggcaacatgcctgatccctcgccaatggcaaattatctctcacagcagaccatgggggacaagacaccggcggatgccatggaagcattgctaggcgtctgtgtgcaatcagttggcatcgagcgttccttcaaactgttgccacatttcggaatcctgccgaaaacgcacaatgtcctgaagctccttgctgacaagatcgaaaaccaacgactgaaaactcatattgatattcgtgaagtagatgcattcctcaagaactacagaagaattgaaagtattctgggatataagttcaaggatagaacttatctcctacaagcactcacccatgcgtcataccctaccaacagaattacgggaagctaccaacagttggaattcctcggcgatgcggtattagatttcctcatctcgatgtacatctttgagcagaaccctaccatgagtcccgggcagttaacagatctgcgctcggctttggtgaataacgtcactttggcgtgcatacttgttcgccatggtctccacttgtacatcctggcagagtcggcatctttcaccgacacagttagcaagtttgtgttgttccaagaacaaaacaaacacgaaattaccgatcaggtgaacttgctcgtcgaagaatcagaccggaagatggccgaattcgtagacgttccgaaggcgctgggcgatgtgttcgagagtctggtagctgcggtctttttggactctggaaacgactttgccgccacctggcaagtcatttacggcatgatgggcaatgaaatattgaccttcaccgagaacacaccgatccagatcgtgcgacagttgtatgagttcaagccgtcgtgcaagccaaccttcagcagggccatcccggacgaggacacggtgcttgttaagctgcggtacgagataaggaaccaacaacacgaagcgtatggttttggtcaaaacaaggacgacgcaaagagggcagcggccaaagcggcactgcaagtgttgcgcaagcactaccgcagtgctaagtaatgtttcgttttgtttaattttctttgtactagtgtcgtttacagatgggagttgttgaactgttttcgcacgtgaattaatattaaatggcgataaaatgttttatagaaagcgtttgaacgatttatcgagtattaaatcaaacataattgtatggaggcaatgtcgcaaaatgtcgacatttttcaagtgtttgtaatactctaatcgtcctacaatactctaatgtaaaaaaaactgtggaagtgctcatcaaatgtgtactaagtcgtttgagtcgaatcagaacatagttttaataaaattccaatagaaatacctatacaaaaaaaaatagaatgaaactccaaatctgactgtttacttgaaaccattgactctcttttgtgatagaagagaattgaagacttggcagtaggttatctcagattggcttccatgctttgttattagcttctaagagggcgggtttggagaagatcattatctaacaatttgaatatcggatcaagccaacggtaaatcgctgtcaaagcaaatacttgtctacgtgtgctggtcgtttatgatcttcggaactgcgaatatgcatttaggcaaagtgtgcttaagattgtcaaagaaatgtttttcttctcagaaggaaaacacgaacaataataagaaaagctatttgattgaatatatgcacgttttatattaccttt

SEQ ID NO: 123 - DNA, 4998 bp, Culex quinquefasciatus
atgcagaccattgaggaaacccaaaaagaggactttgttcctcggttctaccagagccaaatgaaggacgtttgcattgccaaaaatacgatcgtctatctgcccaccggtgccggaaagacgcacattgcgctgatggccattcgcgagctgggacgtcgtggtcatttggaaaagccactttctcagggcggcaagcgcaccttcttcatcgtgaacacggtggcgctggccaagcagcaagcggaaatgatcggccgcaacgtggtcttcaagacgtcggtctacacgagtgatcgcgacgtcgacacatggaagcaggaccgttggctcgaagaatttgccaagtaccagatcatcgtgtgcacgtgtcagattctgctagatgtgctgaagcatggctatctggcaatgagccacatcaacttgctggtttttgacgagtgtcaccacggcgtgggtgatcatccgatgcacgggatcatggagcagtaccttagggcgcgtaaagaagaccggcctcgggtgattggcctgtcggggatgttgctgtacaaggagttgaaaatgaaagagcaagtggctcaggagttggaacggctagagaatacgttcgactctacgattgcgaccgtcggaagttacgacgcgtacacggaggtgtgcaggttttccacggacccgaaggagggcctgctttcgtttcacgtggtgcaatcgtccgacgtgatgcgcaatttgcaggggcaaattaacgattttattaacaaagtagcactttttgatcttcccaaactgttgaaccagaacaaatcgctgatgcgagacatgccgaagcccaaaaaggtgattacgaaatactttaaggaactgaactatcagtttgaagatttgggcctttttggtggcgccatagcgctgctcggactgatcgtgcagtttgagctggacaagcgtgaatcggaccacacgatgctgcgtttgctgtaccgatcgtgcatcacgttctgcgaaaatcttcgccaccagctcgagaacgtgatgcaagggctggagataaagaaaaagttgacgctgttttcgtcgatcaaagcgcgccagctcatcgcccagctggaggggttctacaaggaaggtcgcagccgtaaaacgaaaaccctgatctttgttcagcgtcgcttttcggcaaaggtggtgtaccatctgctgaagatttactttagcgaaaccgaaaacgccgaaaccattctgccggactttatggtcggatgcaacgggacgatgcccgagtcgatcgagcagatcttgtctgcgaaaaaggatcgaagggtgttggagcgtttcaagaagaacgagacaaacgttatcgttacgacgaacgtgctggaggagggcatcgatctgcagatgtgcaactcggtgataaagttcgattatccggaaacgttcgcctcgtacgagcagtcgaaagggcgagcacgcatgaaggacagcacgtacaccgtcatgttggacagcgataagcgggaaaagttcctgaagaagtatcttctctacaaggaaatcgaggaggagctgagaagggcactggttggaaaaaccatcaaccgtccggaaccgctggaggcggatgtaaccaaggagctgaccaacgagctcatcccaccgttctacaccaagaagggtgccaagttggacgccctttcgtcgatccagctgctcaaccggtactgtatgggcatgccacgtgatgccttcaccaacacgaacgtcacctgggaacgacacgacgacaaatacacgggtaaaattgtggtggccgttttgctgccgctgcagtctaccgtgcgtgacaaagtgtttggccagcccatgaccaacgtcaagctggccaagcggtcggccgcgttcgaggcttgccggaagctgtacgaggcgggcgagctcaacgatcatctgattccgatcgattcgaagcggcagttggcaaacgtgagcgaggtttacttccgccactggaagcagtttgaggaagagtcggctaagcaagctggaacgcagaagaacgtccggaaccaccagatccggtacccgtcccaaacgagtggttgctgccctcagcccggaaagccctgttacatctacgtgctgcgcatagcggccggtttcaactcggacgttcaaaacgagaacattgagacgttccacacgctgtacagcagcgagaacaactttggcatcatgactacgaagccactgcccgtgctggcccggatgaagtttttcgtgtcactcggcctgatcaacgtccacctagatccgaccccgattcgggtggagaacgccggcagcgatgcggatttggccgcgctcaagcagtttcagctgatgctgttccgggatgtactgcggctgtggaaggagtttctggtgctggacagcagcaacgaagcaaacagttttttggtggttccgttggcgcagtcgcggcagatcgattggcaggtggtgaaggatttcccgttcctcgcccaaccttccgaactgtcgacggtcgctcgctcgcgcatggttttcgatgcgaagcagtaccgccatcgggtcattctaccttggtatcgtacggacagagagcgcgcgtacgtcgtgacggcggtccacgaacatctgacgccaggcagtccgtttccgaacgaaaagtatcaaacatacgaggattacttcggcaccgtttacggccagcaaatctgcaataaaaaacagttcctgatcgaggtaaagggcatcaccacgtggcttaaccggctcagcccgggagatgaagacgatggcaagagtgccacgcgggcgaagaactggaccttccacgaaattttgattccggaactgtgccacaactttgccttcccggcggactactggctgaaggccacgctgctaccgagtgccctgcatcgaatcaacttcctcctgttggcggagaacatccgggtcgagttggccaccgaggcgaacgtcggttgtctcgagtgtagaaccgttgaggatgtggacgtggaatacaagaaccgcaagtcgactgacctggccaacggaatggacgagctgaagtttgacagtgacgaggacgaggaagacgacgacgatgattttgattacgaggaggcaaaaaaagcgctcgtaggcccggaagatttgaacagcttgatgcgtatccagatgaactcgttcgccgaggaggttgaaatgccctggaaggaacaagacgaaccggtcgatattgaacgcaactgggacaatgtctctgcgttggatctcgattattacgattcgtttgtgaggaagttttcaagccttaacgtgggagagcaaattacgacaaagatggcccaatcttactcttctgtcatccacaagcaagccacccgtgcaagtccgcagaaggtcgccggagctatcctcgatatgtcgctggatgaaaagttccgcattgcattgctgaagctaacaccggaaaacacggtatatgttccgctacagcagtgtgccatcatcaaggcgttgaccaccaaaagtgcgcacgatgtctacgacttggaacggtacgaattgttgggcgacgccttcctcaagtttagcgtgtcgctatttttggtgaagaagcacaaggagtggcacgagggccatctcacggcggtcaagggacaactggtcagcaaccgaaatctgctgtactgtgcgatgctaatcaatttgcccggaatgatgaaaattcacaccttcgatccgaaaaatgactggtcgccaccactcgcaagcgtgccgcatgccgtgaagcaaaagatggccagtatcaaccactcggccagagttctgtacaagctgaaaatgtccgaggaagaaattcaagcgggcaccatcgagaaggacaaatacgaggacttcattgccgagctggacgtacagagccgatcgttggacacttcgcccatgcagaactacctgtcgcaacaggccatgggcgataagatgccggccgattccatggaggccatgctgggcgtttgcgtcagcacggtcggaatcaaacgatcctttagactgctgtcatttttgggcattcttcccaaaaaagaaaatctgacgacgttgctcgacgaccgtatcgcgaaccaacgcctcaaggcggatgtcaccaaaaacgaagtggactcgttcctgatttctccgggacgtatcgagcgcatcctcgactacacgttcaaggatcgaacctacctgctgcaagctttgacgcacgcctcctatccgaccaaccgcatcaccggatcgtaccagcagctcgagtttgttggagacgcagtgctggactttctgatctccgcctacatctacgagcagaacccaaccatgagtcccggccagctcacggatctacggtccgcactcgtgaacaatatcacgctggcctgcattcttgtccggcacggtcttcacctgtacattctgtccgaatcggcatccctcaccgacaccgtcagcaagtttgtagcgttccaggaagcgcacaagcacgaaatcaccgaccaggtgaacctgctgtcggaagaatccgagcgttgccagggcgcaatggccgaattcgtcgacgtgcccaaggcgctgggcgatgtgttcgagagtttgatcggggccgtgttccttgactcgggcaacgacctggaagtgacgtggcgggtgatttacggcctgatgcaccacgagattgcgacattcagtgtggaaacgccgatccagatcgtgcgccgactgtacgagtggaagccaccgtgctatcccaagtttagccaggcaatcgttgatgacgacacggtgctggtgaagctgcgctatcgcattcgaaacgtcgatcatgaagcgtacgggttcggtcagaacaaggaagatgccaagcgggccgctgccaaggcggcgattcagaagcttcggaagcagtag

SEQ ID NO: 124 - DNA, 5019 bp, Anopheles gambiae
tctcagaacaaagaaccgatggaggatttcgcaccccggaactatcaggtgcagatgaaggagatatgtctggccaaaaacacgatcatcttcctgccgaccggctccggcaaaacgtacatcgcgctgatggtgatgaaggagatcagccaccagctgcggaacacggtccacgaggggggcaagcgcaccttctttctcgccaacacggtggcgctggcgaagcagcaggcccagttcttcgccaggcacatgcccttcaacgtgcggctgtacacgagcgaggtgaacgtggacgcgtggaagagcgaccgctggcatgaggagtttagcgaaggccaggtaattatctgcacggcccaaatcttgctggacgtgctgcgccacggctacatgtcgccggccaacatcaatctgatcgtgttcgacgaatgtcaccgggcggtcgggcagcatccgatgcacgcgatcatgaaggaaatagtggcggcgccggcgagcgagcggccgcgcgtcctgggcctgtccggcacgctgctgttcaaggagctgaagatggcctcccaggtgccggatgagctggaacggttggaaaacacgttcagctccaccattgccacggtggccaactacgacgattacgcaacggtggccagcttttccaccaacccgaacgaggtgctcgttacgtacagcaagccggcggtccatctgatgccgctggttaaagaaatgtggccgcggatcgacgcgttcgtcgaatggctgctgcaggtgtatctccccgagtactcgacacagtcgacccggacgctgcagaagtcgttttgcaagccgctgaaggaggtgaagcgggcgctgaccgagtttaagcaccagctcgaggagcacggcatgtacgcgggttcgctcgccatactggcggtgattgtgcagctggaagtgagcaagcggcagtcgccctgcgacaaggcgcgccaggtgtaccgttcggccatttccttctgcgaatcgatccggcacgagctggtcgaggccatgagcgggctgcgagggacgcaccagatacttagcttctcgtcggaccaggcccgcaagctgctgaaatacctggaagattcctatcgcaccgcggaggacaagaacaaacaggcgctggtgtttgtgaagcggcgcttcaccgccaaggtgctctatcatctgatccgcatttactttcattgtctatcgaaacgggacaacgaagacgagctggtcgaacccatcgtaaagccagactttattgtcggcgcgaacgcagcgctggaggaatcgatcgatgccatactcgtagtcagggaggaccgtcgggtcatcgagaacttccgcaagcgcaagatcaacgtgctgtgcgcgacgaacgtgctggaggagggcatcgatctgcagatgtgcaacatggtcatcatgtatgatgcaccgttatcgtacgcctcgttcatgcagtcaaagggccgggcgcggatgaaaaccagcacctatctgatgatgaccccggccgccgatttgcagcagtttgcaaagcgcatgaagctgtaccgcgacattgaaaaccggttaaaggaggaactggtcggcaagacaattaaccggcccgagccgctggagaatgatgtgcggaaggagctgctggacgatctgatacctccgttctacacaccgttcaaggcgaagctggacgcactgtcggcgatccagctgctgaaccggtactgcatgagcatgccgcgcgatctgttcaccggcagcaacgtcacctgggagcgcattgaccgttcgccgacggagatcatcgtgacggtgaagctgccgctgcagtcgacggtacgcgaagtgattcacgggcagacgatgaagaacctgaagctggccaagcagtcggccgcattcaacgcctgcaagcggctgtttgaggtgggcgagctgaacatgtatctgttgccgatcgcgaccaaggataaggtggaagagctgagcgaacagtacttcaagctttggcgcaagatgtcggatgaaccgaatcccaagcaggcaggaacgatgaagtacgtgcgtgggcacaagatcgtctatccggaggaaacggtcggctgcaccccgcaagcggacggcgagcagtgctacgtgtacatcgttcgcatgcgcgcccactttgacgccaacacgcatctggaaaacgtgcgcatctttcaggagctgtacagcagcgcgaacaatttcggcatcctgacgcgcaaacggctcccgcggctggcgcgcatgaagctgttcgtgacgctcggtgcgatcggcgtcgagattgtgccggaaccggtgtgcattacgctggcgcccgactcgggcgagctgcagcggctgaagcgcttccatctgctgctgttccgcgatctgctcaaggtgtggaaaccgttcaccgtgctggacgcgctgccggaggagaacggctttctgatcgtgccgatgctgcgctcgcagtccatcgactgggagctgatgggtaagttcccgtacctgcggccggcggcggaaacgagcacccgcgcccggcagcacctgcggttcgagacggagcagtatctgctgcgcgtcgtccacccgtggtacaagaacgatccggatcagaactacgtggtggtgcgcgtgcgggacgatctgcgcccgaccagccccttcccgaacgccaagtacgactcgtacgagcagtactttgcgcaggaacaccaccaggtggtggtgcggcacgaggaccagttcctgatcgaggtgaagggcattacgaccagcctgaaccggctgcacccgggcgccgaagcggacggtggggcatcgacccgctcgcgctactgggagttccaggagatactgataccggagctggtgcacaacttcgagtttccggcggactactggctgaaggcgacgctgctgccgagcgcgctgcaccgcgtgcactatctgctgctggcggagggcatacgggtggatttggcccggaacgcgcaggtaggcagcgagcattgcgagcgggtcgaggacgttatcatcgaccgggtgctctcgatcgagcaccaaaagtcgactgcactgtacggcggggaggacgacgacgacgacgaggaggacgaggatgaggatgaggaggaaaaggatagcgatgaggagggcgcacgctctatgcaggtgctgaaccaaatccacagcgattcgatctcgctggccgatcgggtccagtacccgtgggaggaaaacgagcagccgaaggatttggagcgcaactgggacacggtgagcaagatcgacatagactactacgcgagcttcgtgaaaaagtacgagcagcaggcggtaacgatcgtgaccgacgtgaaccgatcggtgacggagaccaacatcgaccgtatgctggcgaacctgaacatgaataagaacgaggcggaggcatcgcccgtgaaagctttgcccgcgctcgaggacggccacgggccggtcgcgcagattgcgatgctccggctgacgatggacaacacggcgaacgtggcactgcagcagtcggacctgctgcaagcgctcaccaccaaatcgtccgccgacgtgttcaatctcgagcggttcgaggtgctcggcgatgcgttcctcaagtttgccgtctcggtgtacattctgttccggcacaccagctggcacgagggctacctgaccacgtgcaagggccggatggtgagcaaccgcaacctgctgtattgtgcgatggggtacgggctgccgggcaagattaaggcgcatccgttcgacccgaagaacgactgggtgccaccgctgtccaccgtaccgggcgccgttcggcgggcgatggtcgacgcgaacgagtcgcccgcgctgctctacaacctgaagctcaccgaggaggagatacagtcgggcgtggtagcgcaggccacggtggacaagttcctgccgctgatcgagcaggcgcccgcaccgtcccagtcgaccctgcacaccgtgctgcagcaggtgcagatccgggacaaggtggtggcggacgtgaccgaagccctgctcggcgtgtgcgtcaagacggtcgggtacgagcggtcgttccgcttcctctcccacctgggcatcatcccgaagggtgcggacgtgccgatgctgctgcgcacgaccaccttcccgatcggtgactacttcccggtgcggcacaaggtcgaccagctgctgtgcaatccggagcggatcgaggcgacgctcgggtaccggttccgcaaccgcacctacctgctgcaagcgttcacgcacacgtcgtacacgtccaacagcctgaccggctcctaccagcagctcgagtttctcggcgatgccgtgctggactttctcgtgtcgatgtacatctacgagcgcaacccgtcgatgtcgcccggccagctgaccgatctgcgctcggcgctggtgaacaacgtcaatctggcgtgcgtgctcgtgcgcaacgagctgcaccggcacatcctctcccagtcgcccatgctgacggatgcgatcgggaagtttgtggcggtgcaccggtgccaccggaaccagggcagcaactgggtgcgcctgctgaccgaggagtccgacacaccgatggcggagtacgtggacgtgccgaaggtgctgggcgacgtgctggaagcgctgatcggggcaatctatctcgacagtgggaacgatctggccgccacctgggaggtgtgcttccggctgttgcgcgacgagattgcggactttacgcgcaaaacaccgatccaggtggtgcgccagctgtacgagcatccggaggcgagcccccactttagtgccccgttcgtggaggaggaggtggtgtatgtgaagctgtcctacacgcaccgctcccagcgccagacggtgtacgggttcggcaaaaacaaggacgacgctaagcgtgccgccgccaagattgctcttagtaagattatgtag

SEQ ID NO: 125 - DNA, 3964 bp, Aedes aegypti
atagcggatctcactaaccaaaaagcttctccgtcgtgtgttgttttgcgtttcgcttcttttttgacatgcttgcaattcactcgcttttgtaactcgaatctgcttactcgtgtcgcgtagtgctcgtcaaattagattaacaaaaaaacgcgttcgaatttatttaccatacattttagattgattcgcgatttgtgcgcacctgttctgatcgttggtgaagagtgcattcgatatctaccggtaaaaggagtttctaaacgtacgacggaaaaatgtcctcgcggttgaatttagttcgcgcgtttctcagtcagtctggttcatccggagatgccgcggaacgcacgaaggccccatcttccggcgaagcccccagcgaaggggtcgacagtggttttcaaacgcgcaccccggaaagcaccccgaccacacaacgtaaaggaattggacgcggccagttgacctcggatgctggcagagccaccggaacatctggagcggattcatcggaatcggatgacaaacagtccagtattggatctgccatgccgtccttgagcggtcgcggaagggctcagtttattcaggcccttatccgtcaaccgttcgaaccggcgccatcggttgtctccgacgattcgtcctccatggtgtctgcaagggtgtcgcaaattgcctgcggcagaggaagattcatccagcagctgctgaacacggctgcggatgccgagagcatcgaaacacaatcgaacggaaaacatgacgaactctccgaagcggtttcacaggtcaccatcgctgaaacggtcgaaacggtggaaaaagcaccggtcatcaagactggatcgagcggaactcctgtccgactgatgaccaactacattcgtttggcttgtgatccggaccgcggaatctacgaatacgaagtacggttccatcccttggtggactcgaaagcaattagagctcgttacatcgcacaacacaaggatgtccttggcaatgctaaaacgttcgacggcgttaagctgttcctgccaaagaagcttccccaagcggaactcaccctccaatcgaagaaccccgtcgacggccacgaagttacgatcaagatcatttacaagcgcaaacagcgaatgagcgagaacattcaattctacaacattctcttccaacgcattatgaaagtcctgaagatggtcgagatgggtcgtaagaactttgacccctcggccccgaaactgattccgcagcatcgtctggagatctggccgggatacgttagcgctgtggacgaatatgagggcggcttgatgttgaatctcgacgtgtcccatcgtgtgctgctccagacgacggttttggatcacatccgaacgctggcaagggccaatccccaagattacaaaaacatggccaccaaatcgctgctgggagccgttatattgacccgatacaacaacaaaacgtaccgtatcgacgacattctgttcgatcagaatccgaccatgactttcgaagccaacgggcagccaatttcgtacctgcagtattacaaacagcagtacaacatcgacatccacgatctgaagcagccgctgctgattaatcgcaaggagcgtcgtgtatctggccaagacaaaccgatggaaatgatcatgtgcttgatcccggagatttgctaccttaccggattgaccgacgagatgcgaagcgatttcaaggtgatgagagacatcgctgccttcacccgggtatcgccgaatcaacgtttaaacagcatgcgtcaattctgtcgcaacgtgaacgaaaacaaggaagcccgggaaattctggaagtctggggcctaacactggacatgaatgctcttatgatggagggacgttgcttcaaagaggaacaggtgaacttcagtggggtgaatgtgggtgttggaaagagtggagatttcaaccgggccgtcaccagtaacaacgttctgcaagcggtcaacattcgcaactggctcttggtgcacacggcgaaggacaccagaattgccaaatcgtttatggattgcgttgaacgcagctgtcgtcccatgggtattcaaattggaccgccagcaattgaggttctgcaggccgacaaaaccgagctgtacgtacagctgctgcgtacgaaaattcgccaggaaacgcaaatcgttgttataatctgcccaacgtcaagagatgaccgatacgctgctatcaaacgtatttgctgttcggaaatcccagtcccatcgcaggtcatcaacgctcgcactctgagtaacgaggccaaaaaccgagccattgtgcagaagatcatcctccagatgaactgcaaactgggtggaacgctgtggagcattcgtatcccgttcgacaacgtgatgatcgccggcatcgatacctatcacgatccgaagcagaagagcaactccgtttcggcattcgtagcttcgttgaatggtgactacaccagatggtattcacgtgcttgcattcagagcaagaaggaggagttcatcaacggattgtgtgcatcgatggagaagtctttgaaggcttaccagaaggcaaactgtcagctgccgaagaagattatcattttcagagatggcgttggagacggtcagctgcgaatgtgctccgagtacgaaattccacaactgcaggagtcgtgtaagctagtggaaccggattacaatccggagataacattcattgtcgtccagaagcgtatcaacacccgtatgttccgtatcgacggtaacaacttggaaaacccgaaccctggcaccgttctggatcacaccatcacccgacgcaaccacttcgattacttcctggtgccgcagtcggtccggcagggcagcgtctcgcccactcactacattgtggtccacaaccagtcgaaccactcgccggacatcctgcaacggttgagctacaaactgtgctatctgtactacaactggcccggaagtgttcgagttcctgcttgctgtcagtacgcccacaaaatggcctatctcattggacagtcggtgaaacggaatccggacgaggcgctgaacgacaaactgttctacctgtgaatggcgtcatcggtttaccgccagctgggagttttgttttatccaaagggactgagttgttttcgatttatgttttcttctcgaaatgagatgtgttttatcaagtttctatagagagagagatacctaaaatgagtgccttgttaatcagcgacatgattttcccgctgagataacctataaaatgtttttgttacaacatattcggtaactaaagactgaattccatctatttttgagttacctcatcaatgacgcgttttgagtgaactagaagagaaaaatctaacgtctttgagctcctcgctcgccctggttttcaatttcaggcactcgatacattttaaaacatttcaacacatctgaacacgccaaatacgtcgttggctgtttgtaccagagtcgtacaaattacattctccacaatatgttaacttctaacgttggactgagcaatgataacgttctactaacctacatttattagaatgaaataacagttagtgcataatcaaggaagtttttcgttatttttttataaactccaatcctatcggaaggtacctacaggatttaagtgcccatccgatggatcgttagggagaaatctcatattttatctaataaaataaacataaattcataaatatgaacctgtattcattaattatccgaaactcgaaaacagttaaactattgtaaatcctcgcaaactatctcaaacatcttattggtagcgctatattacgttttaggtgcaccaaggtggtgagaccgtcacaaacaattttcatcttgctccgcctacccctaacacttatcgacatatgtttaaccttcgggctgtcgcg

SEQ ID NO: 126 - DNA, 2544 bp, Culex quinquefasciatus
atgtcttcccggttgaatctggtgcggacgctgctgagccagtccagctcgtcggaggaccgaggttccggcggaaccagtgcagaagcttcggcggacaccggcttccagacgcgcacgccggagacgacaccgaactcgcagcgcaaaatcattggccgtggccagccggctggtagcgttccgacgatcgggacgagcgggctggactcttcggagtcggacaatcaggcaagtgtggtgtcgtcgaacgttggacccacgctttcgggtcgtggtcgggcccagtttattcaggggctgttgaagcagccgctggagtccgggcggtcgattccgacggtggcggatgattcggccagtacgatttcgtccgcgccggccgtgtcgattctgggggcggggcgtgggcggttcatgcagcagttgatgaacactcgtgcggacgagccgagcgttagcgacgagagcaagactcagctgacggagcaaatgtcgcagattacgatcgccgaaacggtgcagacggtagagcgggaaccggtgaagcgaatgggaacgaagggcacaccggtacagctcatgaccaattacattaggattgcttgcgatccggatcgtggtctgtacgagtacgaagtgcgcttcaacccggaagtggactcgaaagtggcgcgatcgaagtacatcaaccagcatcgagaggtgattgggaatgctaagacgtttgacggggttaagctgttcctgccgaagaagctgcccaacgtggaaacaattctgcagtcggaaaacgaagtcgacggacacacggtcacgattcggttgatgtacaaacggaagcagcggatgtcggagaacatccagttctacaatattctcttccagcggattatgaaggtgctcaagatgatagagatggggcggaagaacttcgatccgtccgcgccgaagctcatcccacagcaccggctggaaatctggccgggttacgtgagcgccgtcgacgagtacgaaggtgggctgatgctgaatctggacgtttcgcatcgcgttctgctgcagaccaccgtgctggaccacatccgtacaatcgccaaaagcaatccaagcgactggaagaaccttgtcaccaagtcactgctcggggccgtcatcctgacccggtacaacaacaaaacgtaccgcatcgacgacatcatcttcgaccagaacccgacgatgacgttcatgtccagcaaccggcagcagcaaatctcgtacgttgagtactacaagcaacagtacaacatcacaatccacgatctaaagcagccgctgctgattcaccgcaaggagcgtcgcatcgccggccaggacaaaccacaggagctgatgatgtgcctcattccggagataagctacctgaccggactcaccgacgagatgcgaaacgacttcaaagtgatgcgtgacattgcggccttcacacgggtctctccgaaccagcgactcaacagtatgcgccagttttgctacaacgtcaaccaaaacaaggaggcgcgtgaaatcctcgaagtttggggcctcaaactggacatggaaccgctcgtcatgaagggccgcgccttcgaggaggaaaaagtcatcttcggcaacgcccaagtcggcgtcggcaaggccggtgacttcaaccgagccgtcacaagcagcaacatgctcagcgccatcccaatccgcaagtggctgctcgtgcacaccaacaaggacatgaagatcgccaagtccttcatggactgcgtgcagcgcagctgtcgacccatgggaatcgaagtggacacccccgccatcgaagtcctgcccaccgacaaaaccgaactgtacgtgcaactcctgcgcaccaaaatccgccaagacacccaaatcgtcgtcatcatctgcccgacgtcccgcgacgatcggtacgccgccatcaagcgaatctgctgctcggaaatccccgtcccgtcccaggtcatcaacgcgcggacgctcgccaacgaggcgaaaaatcgcgccatcgtgcagaagatcctgctccagatgaactgcaaactgggcggaacgctgtggagcatcaagatcccgttccagaacgtgatgatcgccggcatcgacacctaccacgacccgaagcagaagagcaactcggtgtcggcgtttgtggcgtcgctgaacggggagtacacgcgttggtactcgcgcgcctgcatccagagcaagaaggaggagtttatgaacgggctgtgcgcctcgctggagaagtcgctgcgcgcgtacgagaagctgaacggggtgctgccgcagaagattatcatcttcagtttaccggtagtaaccctttgcaaaaaggttgcgtccgagtttgccttcgagtctcctgccgcgcgtagcaaagtgataccaaatttgatctctagttcatctgaagaagaaaaatatgtgtcgttacctgacgggtactcgttttctgatacccgactagtcggaagtcgaagttaccggcaagcctggaggaaagtttag

SEQ ID NO: 127 - DNA, 3336 bp, Anopheles gambiae
atgagttcacggaaggacttttttcggtcgataattgaatcctcctcgtcgatcggtggctcgaacaacgattcggcgaacgctacgtcacagaacctcgacagtgggtaccgtacgggcgtaacgaccagcggcgaggaaccggccgcaccgttgccagttcagggccgtggacgagcatgggcactttcgtcgcttggtgtgacgatggcaccgccggccgatgcggcggcaccgctggtgacgccgatggaaaacctcgtcatgggaggacggggccgatttttgcagaagcttctgagccaagccgccccgaccgctgccacggtagagccaccggcggatacgaccgttccgatctcgtcggccacttccggagcgggaacggcatcgatcaaggacagcgacgctcggtcggtcgcatcaaggcaggcgtcggactttaccaagccggaggattcgtttgtgctgcgtgaatgcaaggagcagggcgagccggtcatacgcatcgggaaggagggcaacccgctgcacctgatgggcaacttcatggagctgaagtgcgagccggatcgcggtatcttcctgtacacggtcgactttagcccgccgatcgatgcgaagcgcacccgccagcggtgcatcgacagccacaaggacgtgttcggcacggcgtacacgttcgacgggcacatactgctgctgccgaaagcgttggagcaggagcggttcaagctgacgtcccaacatccgaccgagggtacgcccgtcacgctgtcggtggtgttccgcgtgcagcagcagatgagccagaatgtggcgttctacaacaagctgttccggcgcatcatgtacatgctgcagctgtccgagatgggccgcaagcacttcgatccgacgcaggcccgcatcataccgcagcacaagctggagatttggcccgggttcgtgacggcggtgaacgagttcgagggcgggctgatgctgaacctggacgtaacgcaccgcgtgctgatgcaaacgacggtgtacacgcacatcaagatgctggcccaggcccgcggtggccagtttcgggagaatgtgctgaagtcgctgctcggggcggtcgtgctgacgcggtacaacaagaaaacgtaccgcatcgacgatgtgtgcttcgacacgaacccgctcagcacgttccggtacggggagcgggacatctcgtacgtggagtactacaaggagcagtacgggctggaaattaaggaccaccagcagccactgttgctgaaccggtcggagcggcgcgtggtggggaagaccgagccggaggagatgattgtttgcctggtgccggagatttgcttcctcactgggttgaccgatgagatgcgaaacgatcataaggtaatgcgcgatattgcgacgtacacgcgcatcacaccgaaccaacgcctcgtcgcgatgcgccagttttgcgagaatgtgaacaaaaatgaagccgcccgcaagctgctcgcctcctgggggctcgagctgatgatcaccccgaaggtgatgatgggtcggcagctcccgcccgaaaacatcacgtccggcggcggtgtggtaggcagcgccggcccgaacgtcgactacacccgccaggtcaccaacaatccgatgctggagatcgtccacatccgccagtggatgctgctgtacacgcagcgcgacgagcagcacgcgtccgtgtttcgcgattgcgtgaagcgtacctgcaagctgctcgggttggaagtcgcccagccgcaggtcgaagtgctgccgcaggacgccaccaacctgtacgtgcaggcgctgcgcacccgcatccgccccggcacccagatcgtggtcatcatttgcccgacgtcccgggacgatcggtacgccgcgatcaagcgcatcctctgcacggaggtgccgatcccgtcgcaggtcattaacgcgcgcacgctcgcgaacgagaagcgcaaccggtcggtcgtgctgaaggtgctgctgcagatgaactgcaagctcggtgggtccctatggggcgtccgcgtgccgatcaaacgcaccatgatctgtggcattgacacgtaccacgaggcgaagcagcgctccaactcggtggccgcgttcgtcggttcgctcgacgctgccttcacgcactggtactcgcgggcgaccgtgcaggagcggaaggaggaaatcctgaacgggctgtgcgtgtcgctcgagaagacgctgcaggcgtaccagcggcgcaactgccacctgccggacaggatcatcattttccgcgacggtgtcagcgacgagcagacaaacatttgcctggactacgagataccgcagctgcaggcggcctgcaagctggtccagccggactacgagccgaagattacgttcatcgtggtgcagaagcgcatcattacgcgcctgttcacgatgagccgcggtggtggggatggcgatgggcaagcgaatgcaccgcccggtaccgtgctggacaacacggtcacacggcggtacatgtttgactttttcctcgtatcgcagacggtgcagatgggcacggtgacaccgacgcattacatcgtgctgcgggacgattccaagttttcgcccgacattctgcagcagctgagctacaagatgtgctacatgtactacaactggaccggcacgattcgtgtgccggcgtgttgtcagtacgcacacaagctggcgtatcttgttggacagtcggtcaagcgaatgccggcggaatcgttgaacgacaagctgttctacctgtaagaaggcgcaaacgcctttggagcggcaaagggattttttttttttcttttgacaattgtgttgttcatctcagggaattcccattccgaatttgtctctttttctatattctacttgatacacatgcagcttagggtatgcatgcaaatttctcttctttatttttcactactaacattacggaattcaatctcgtttctacacacgttactgacacacactgatataacacacatatgtattaacctcttcttttttgagctgtacaattgtgaacttattatacattggttgaactaagaattagacatgggtgagaatttatgggttataccaatagagagatgcataacgaacccaagtgccttaacagatcacgccaatttatttacatttttagcattaaaacgtcctctagctcgtagagaaggggaaagcttcatctattttctttttatattattcactttttgcgaacaaattttaagaacaagagagattcttattttcgttggtaggaatgttcatgaatctgaattaaag

SEQ ID NO: 128 - DNA, 5057 bp, Aedes aegypti
tttgttgttgaaagctgactacgtccggatgtaaatcggaatcgcgcgtgtttgtgatcagtttttataacgtttgaaactattttgttggaataattcgattcgaaaagcaaaccgagtgtgtccagtatctgaaaactattatacgaataagtgtagtgcgttttgttgcccagaaaattgatttcggaagtcgcttgtctagctggtgtttgtgcgcttcagctgttgcaaaaggaaaatggacgacatcgacgagttcttcgatttcagcaagccgttcaaccgggttgtgatctccggaggttactgcaatgccaccgtcgtcgaagacaagaccctcttcaacaagatgccggagagggaaaagatgggaaaggagtacgccggaaaattcatccgcgaggaagaaagtcaactgatcaatgcatttctcgatgaagcagctggtccatctacttcgcgcacttccaacctagaagatgtggacgatgaaatgtccatggccgatgaggacgaagagcacaccaaagcgctgaaggccaaggagatgatgcttcccctgtttcagaagtacaatttcaccctaaagcacaacaaattgccgattcgccactcgaaggatgacattttggctcgaattcgggagaacccggtcatcgtactggaaggtcctaccggatgcggtaagacaacccaggtgccgcaattcatcttggaagaagcctaccatcggaaggaatattgcaacattatcgtgactcaaccacgaaaaatcgctgccatgtccatcgcgaaacgagtttctgaggaacggaaatgtgagctcggaacgttggtcggattcaaagttggcctgaaggagtgtctctctcccgacacccgactcttgtactgcacgactggagtgctgttacaatcattgatcaattccaaaacaatggcgaactatactcacgtgattctggatgaaattcacgaacgagaggttgacatggatttcttgctgatcgttgtacgtcgattcttggctacgaattcctctaaaaccaaagtcatcctcatgtcggccacaatcgactcaaaagcattcgcagaatactttaaaactccgaagaaagtcggatatctaacggcacccataatctcagtggacagaccacgcctgtacgaagtcaaagaattttactacgacgacttggacaaactccggctggactttgcgatcgactacgagaatccgggcatttcctcgcacatgtacacggtagccgccaaattggtactggtttgtgaccgattgatcgaaaacatgcacggagaggagcgaatggaatacaaaccgacggtgctgattttcctaccgggtatcaacgagatagaccgaatggatcacgtgctgcgggaaacgttgacccgtattgtcaatcccaaggagaagccaaatctggacattcataggctgcattcgattcttcccgctgacgaacaggtgaaagtattccgcaagccagctcctggacagcgcaaagtaatcctttcgaccaacattgctgagagttccatcacggtcccggacgtaaaattcatcatcgatttctgcctacagcgtgtcctgttcactgatactaccactaatttttcaactttgcgcacggaatgggcatcacaagcaaattgcatccaacggcaaggtcgtgctggtcgtgtaatggatggacgagtctaccggctggtcgatcgccgcttctacgagaaccaaatgcgcttctctacctcaccggaaatcttacgctgtcctttggagaatgtcattctaaaagccaaactgctggaaatgggacctccccactcgattcttgcactggccatgaacccaccggatctgagtgacatcagaaacacggttctgcagctgaaggaactcggtgctttggtgcaaacggttaagggtaactatgagcagttggacggtgatttaacctacatgggtcgcattatggcaaaactgcccctagatctgcgcatttcgaagctcatcattttgggctacatattcagcgtgttagaggaatcgatcatcattgctgccggaatgaacgagaagaacattttccttaatcagaattccgttcggggctactcgcaaaaaatgtattgggcggatggatcgggaagcgatggaattgctatcttgaacgcttacattgcctggaagagccgaaaagaacaggcaggaaatgaaagcgatatggccagttggacccgtcggatgtccctggatctgaagtgcctcatggacatggccgagttgatacgcgaaatcaaagatcgtctcaaccatgtaggcatgaaggaagtgtccggaccgggccgagtcgtttggtcgtcccgagagaaaacggtcattctgaaggtgatcatggctggtgccttctatccgaactacttcattccgatgtcggttggcggaaaggaactgatggagcggcaatcgttcactgagctgggtggtcgcgatccctgtaatacggtgttcttcaccggttttgatcacgagaagtacatcggaccgttgtacacggtgcagatcaagaaactgcttagcgaaggggatttctccaaacatcaaaatatgaaggttatgtacgaccgcacaaccaaccgtatcttcgtgacgttcctgggtagcaacgatgagcacgatcagcgtggagccttcatgcccgggaaagtacacgccgacgtgtaccgtgcgatcaagctacgcaaactggggtcccgtaatcggatcatggaaatcaggaccatgcgtcagcgtgatgctatcgagtttgccaccgaaatgaatttgggacactgggaggacgccaatgggtgggtcccacgtcgaaaagtgatacgtaatgcgcacctctcggtcattccggctatccaccaggccagtatggtgtgccaggtgacgaacgtgatccattgcaacaagttttatctgcgcccggaagatacgaagaataaggacattttcatggacattcactccaagttgaactctagagggtatcggttggagcgattcgatccagattggcaatttgccgtgggccaaatggttgccgcaccgcttgaagaaggaagcgatcgttatgcccgggctgtgctgaagaactacaaaaacattcgaagcactggtgatgtcatgtggacagttttcttcttggattatggacattcgtcggtcttgggacaatcagctttcagaaaacttgatggacctcttgcgtacatgaaagaaatccctcaacgtgtctttgaggccacattgtctgagatccaaccttcggcgattatttctccgcaaggtatctggaccgcccagtccattaaccgtttcaaagaaatgacactgggaaagatcttcgtcgttgacgtctactcggtggttaacgatgtggccagcgttgtcctcaagaagggagacgaagttccgataaattccgaactcatccggctgaaatttgctcaatacgccgaagagagctacatttcaaagctggatcacgacatgcgcgaacgaaagcaacgagaaatgtcgctcgatgaagatgttcgttacgaggtatatcattcgtccaaaaacaatcagctaaaatacgaggaagacgaattggaagacgtttcccctccggaagaaaagctgcgttgcaaagttatgctttccggaccacacagtcctctggaaaccacagcttcatcgacggtccgatcgggcgttatgaaaccagtgacgatcgagaacgattccgtcaattccatcctgctggattccaacccgcaggacacccatgagaaaatgctcgtcggagcgtttgtccacgagcaaggcaatcggttggttgtccgacaagcttccatgatgccgaacattccaggatttggccctctgatggcactgatcttctgtcccacctgccagatgaagaaagatgaggaggaaacgcgagtggtttcgattctgacgggtctgggatgcgacaagaataccggggaatcgttgttccccgaacatgatttggcgttgacgctggatgtcgttttatcggacgacgacataacggagataaacgctctgcgctacacaatggataccattctgcacaccgatcaggaccaaaccgtgcccaaattcggggatgtgtccatcgagaacctgaaagcgaaagtgaagcagtacattattaaaattctggagcacgagcgtaaattcatggacattcgccatgcgccgaacgattacgattggaagctcgtggaagaaaacaatgccgctgaggcatcgtcctcgtcgaagaagcgcaaacaggacttcaacatctacgacaacgccatctatccgctgctgcctccgctcggccttctgccggtcagtgccaagcagttggacttcctcaagagacattgtcgcgagttgcacaaactggccctcacggacgttaacctaccgcgtcacggtatcacgtgtcaaatgtgcaacaccatactggaaacattgccacagttgcgcatccatctctactcgaagctgcaccgtgatcgtgaatctcaaatcaagttccgataaattgacgccaccaacacaccaactatcggtagtgatttgtacctttcaatttttatgtttcttttacctgatttttttttgtctaaagtttcatggtcaatatgaattaccattctaccctgctttattttcattttatgttagttgtaatccaattacttacgtttagcgttattacatgtgctctgttacttagagtgaacgaaatttttcaaccgtttagctatgggactggacttgaggtgatttttgagacgcggttctaattacgatatgataattacatacgtagagaagttacatacattacatacgaagagatatcccgcagacgcattacgtaaaggtaattagtcattgatatgctaaattacaatcttttttcagtcccagctggaatatcaaagcaaatacaagcaatttgtgcacaaaatgt

SEQ ID NO: 129 - DNA, 4191 bp, Culex quinquefasciatus
atggacgaggcagccggcccgtcgacatcgcgcacctcaaacctggaggacgtcgacgacgagggcgcgtcgttggccgaggaggacgaggaacacaccaaggcgctcaaggccaaggagatgatggcaccgctcttccagcggtacaacttcaccatgaagaagaacgatctgccgatcaactggaacaagccggaaatcctcgacaagatccgctcgaacgcggtcgtcgtgctgcagggtgcgaccggttgcggcaagaccacccaggtgccgcagtacctgctggaggaggcgttcgagcgcaaggagtactgcaacatcatcgtgacgcagccgcgtaaaattgcggccatttcgatcgcgagacgcgtcgcgcaggaacgcaagtgcgacctgggtacgctggttgggtacaaggtgggcctgaaggaacagcacaacgaggacacccggctgctgtacgtgacgacgggggtgttgctgcagtcgctgatcaacagcaagacgatggccacgtacacgcacgtcatcctggacgaggtgcacgaacgggaggtggacatggactttctgttgattgtggtgcggcggttgctgtcgacgaattcgaagaaaaccaaggtgatcctcatgtcggccacgatcgacgcgaagggtttctcggagtactttaagattccgaagaagtcgggttatttgagtgcgcccgttatctcggtcgagcgtccgcggctgcacgtggtgcaggagttttactttgacgatctggagaagttgaaggtcgacttccagatcgattacgaggcgccgggcattagcgagcagatgtacaacatcgcggcgaagctggtggtggtttgcgatcacctcaaggggcaggagtttggcgactcgctggagtacaaaccgtcgatcatcatctttctgccggggataaacgagatcgagaagatggagggcgcgctggagaagctgatcgcgtcgattcagaacgccgcgcagcggccaaatttgctgattatgaagctgcattcgacgctgccggcggatgatcagacggccgtgttccgcaagcccggtccgaaccagcgcaaggtcatcctgtcgacgaacattgcggagagttcgattacggtgccggacatcaagtttgtgattgatttctgcctgcagcgcatcctggtcacggacacgttgaccaacttttccacgctccgtaccgagtgggcctcgaagagtaactgtattcagcgggcgggtcgtgccggtcggttgatgagtggtcgcgtgtaccggctggtggatcggcgcttcttcgagaacaacatggacgtttcgacgtcgccggagattctgcgctgtccgctggagacggtggtgttgaaggcgaagctgctggagatgggcacgccgccgtccattttggcgctggccatggcaccgccgaacttggacgacatccggaacacgattctgctgctgaaggaggtcggtgcgatgttgcgcacggtgaaggggaactacgaccagctggacggggacttgacgtatttgggacggatcatgtcgaagctgccgctggatattcgcatctcgaagctgattatgttggggtacatcttcagcgtgatggaggaagcggtcacgatcggggcgggcatgaatgtgaagaacatatttttgaatcaaaactcggtcaagacgtactcgcagaagatgtactgggcggacggatctggcagtgatgcgattgcgattctgaatgcttacacggcgtggaagagtcgtcaggaacaggcgggagataccgcggacatgtacaactgggcgcggcgaatgtcgctggaccggaagagtctgatcgacatggctgagctgatccacgaggtgaaagatcggttgaaccgttcggggttgaagccggtgtcgggaccgaatcgtgtggtgtggaatgcccgtgagaagacggtcattttgaaggtgatcttggctggagcgttctacccgaactacttcattccgatgtcggtgggtgggaaggagttgatggagcggcagtcctttacggagttgggcggacgagatccgtgcaacacggtgttcttcaccgggtttgatcatgagcgttacattggtccgctgtatacggtgcagatcaagaagatactgagcgaaggcgactactcgaagcatcaggccatgaaggtgatgtacgaccggaccacgaatcgaatctttgtcacgttcctgggcacgacggacgaacgcgaccagcggggatcgtttatgccggggaaagtccacgcggacgtttatcgcgcgataaagttgcgcaaactgggcgcacggaaccggattacggagattcgtacgatgcgtcagcgggacgcgattgattatgctacgagtgcggggcttggccactgggaggacgccaacggttgggtaccgcgtcgtaagatcgtcaggaacgcacatctgtcggtgttgccgccgattttccgcgagaaggtcgtctgccaggtgacgcacgttgtccacccgaacaagttcttcctgcggccggaggacaatcgcaacaaggacatcttccgggagattcacactcagctgaacgctcgccagttgcacccgttcccggcggacgccaacttcgccatggggcagatggtggccgctccggtgcaggagaaccaggaaacgtacgcccgagccgtgctgaggagctatcgcaacgtgcgcaccacgggcagcgtgtcgtggacggtgttcttcatcgattacggccacactgccgccatggaagagaccgccttccgccagctggacgattcgttgggacagctcaaggacatcccaccgcgggcattcgaagccacgctgacggaaattcaaccgtccgccatcatctcgccacagggctcgtggacaaccgagtcgatccatcgcttcaaggagctggtcctcggaaagattttcgtcgcgaaggtctactcggtcgttggcgtcgtggccagcgtggaactgtcgcgagacgaaattcgaatgaactccgaactaattcggctcaagtacgcacagtacgccgaagagagctacatttccaagctagaccacgatcaccgcgagcgcaagcagcgtgaaatcatgatggacgaaaatctacgcaacgaagtgtaccgctcagccgagttgacccaaaacacgtacgaagacgacgaactggaggacgtgaacccaccggaggacaaactacgctgcaaggtcgtcctgtcgggtccgcacagcccgctcgagacgagcgcctcggccacgatccggtccagcgtgatgaagccggtttcgatagaaagtgactcggtcaactcgatcctgctcgactcgaacccgcaggacacccacgagaagctgctagtcgccggcggagtcaacgagcagggcaaccggctggtgctgcgtcagacctcggtgatgcccaacattcccggcttcggcgccatcatgtcgctgatcttctgcccgactgcgcagctcaaaaaggacaaggacgaaacgcgcgtcgtcacggtcctctccgggctgggctacgacccgagcaccggcgaggccctctaccccgagcacgacatggccctgacgctggacgtggtgctcaacgacgacgatatcacgaatatcaacgccctgcgctataccatggacagtattctgcacacgggcgagggccaaaccgaccccaagttcggcgacgcttccatccagaagctcaagctccaagtgaagcagtacattattaaaatcctcgagcacgagcggcgcttcctggacctgcgtcacgcccccaacgactacaactggcggtgcgatctgaacctcaccgcgggctcctcctcgtcgaagaagatgaagggcgactttaacatctacgacaagaaggccatcttcccgttgctggagccgctgaacctgctgccggtcagcgccagccagctcaccttcctcaagaagcactgccacgagctgcacaagctggcccacacggacgtccagctgccccggcacggcatcacctgccagctgtgcaacaacgtgctcgagacgctgccccagctgcgcatccatctgtactcgaagctgcaccgggatcgagaatcccaaatcaagtaccggtcgccgcaaatgtactaa

SEQ ID NO: 130 - DNA, 4924 bp, Anopheles gambiae
atggaagatgacgatgttgcggactttttcgatttttccaaaccattcaaacgcaccgtcgtatcgggcggatacatcaatggcgcggttaaaccacaaaagcttaacatccagacgctgccggaacgggcgcatcagggaacggaatacgcggaaaagttttgccgggaagaggaggctcgactaatggagggttgggttgacgaaacgttgaacaagtcgacggcatcccggctcgagcaggtggacgacatgtcgtcggtgatggaggaagacacacagcacctgcagcgtgtgcgggcaaaggagctgatggagccgctgttcagtcggtacaacttcaccgtcaccccgaaccggctcacgattcatcagtcaaaacaggacattctgaaggcaatacgcgagaacccggtggtcgtgctgcagggtatgacgggatgcggtaaaacgacgcaggtgccacagtacctgctggaggatgcgtacaaccggaaggagtggtgcaacatcgttgtcacacagccgcgcaagattgccgcctcctcgatcgcgcggcgcgttgccgaagagcgcaactgtgcgctcggttcgctcgtcgggttcaaggtgggtctgaaggagatggtcagcgaagacacgcgcctgacgtacgtgacgacaggcgtgctgctgaacaagctcatcacgtccaaatccatcagcagctacacgcacatcattctggacgaggtgcacgagcgagaagtggatatggactttctgctcatcatcgtacgccgcttgctagccacgatgcgcaacacaaagatcatactgatgtcggccacgattgaatcgtccgagtttgcccagtacttcaagataccgggcccgaacagtctgttcgcaccgcagctggccgtttccaacgttacgcagcacgatgtgtcggtgtactatttggaagatttagaaaagctgagggttgactttaccatcaagtacgagcagccggatgtgcacgagaagatgtacttcctggcggccaaagtggccgtggtgtgcgatcgattcatcgacgagtttgaatcggcgtcgaccatcgattacaagccgtcgatcatcatgtttctgcccggcatcaacgaaatcgaacggatggcggaagtgctgcgcaactttctgggcgacagcaatgtcaactcgcaggagcagaccaagtttacgattctgaagctgcactcgatgctgccctcggaggagcaggcgctggtgttcaccaaaccgtcacccggctaccggaaggtgattctgtcaacgaacattgccgaaagttcgatcaccataccggatgtgaagtttgtgatcgatttctgtctgcaccgtgtgctggttgccgatacgctgaacaatttcaccaccctgcgcacacagtgggcctctcgcaacaactgcatccagcgggccggacgctgcggtcgtgtgatgaatgggcgggtgtaccggctggtgaacaagcacttcttcgagcacgggatggcccaatcgatcgagccggaaatggtgcgctgtccgttgagcaatgtcgtgctgaaaacgaagctcctggacatggggccgccgcacacgatactcgccctggccatgtcgcccccgaacctgtccgacgtgagcaacacggtgctgcagctgaaggagcttggcgcactgttgcgaacggccaagggtgtgtacgatctgcaggacggtgacatcacgtacctgggcaacataatgtctacgctgccgctggacatacacctcgcgaagctggtcgtgctggggtacgtgttttccgtactcgaggaagccatcgtcatcgcggccggcatgaacgtgaagaacattttctgccagctgcgtacgatcgaagcgctgcgggtgaagcgccactttgccaacggttctgcgtccgatggcatcgcgatcctcaacgcgtacaactggtggcgctcgatcagggagcaaggcacggggggcgacacgaccgattggtgcaatcggtacatgctcgatcggaagtcactgatcgagatggccgagctggtgcaggaaataacgatgcggctcaagacggcgaacatacgcgtcgttagcggggcgaacaatgcccggtggaccgatcgggagcgtacggtcgtgctgaaggtggtgatggcgggcgcgttctatcccaactacttcatcccgacgtgcgtcaccgaccgcgagctgagcgacaagatggtttacaccgagatcggtggccgggacccgttcagtacggtgtttttctgcgggttcgaccacagcaactacatcggtccgctgtaccggaatgagatccgagcgctgctgaccgagcgaaagccgaccagcgagaagcaccaggtgaaggtggaattcgagcgcagcacgaacaaaatctttgtgcagttccagtacccaccggaccagcagagcgggaagagtctgtacgaggagcgcaactcggccgatcgcgtgcatccgggtgtgtacgaggcgatcaagctgcgccagctgcgccacaaccagtcggagctgctggtgatgcaccacaacgacgcggttgcctacgcgaccgagcatcgactgggcgtgtggagaaaccacgagtggcacccgcgcagtgtcgagatcccgaatgcgcacctctcggtggagccgccgatccactggaaccgggtgacggccaccgttacgcacgtggagcacccgaacaagttctaccttcgcccgcatgacgaaaaaaacgacaacatttaccacgacatcatggagaaactgaacgggtgcgatgcagtgttgcgcgccttccccgaaggctacgcgtttaagcagcgcgatatcgtggccgcaccgctgccgaacatggtcacgggcaagatggcacgcgccaagcttctgcagcagtgccttgttcgcggcgtcgaacactggacggtgttcttcatggatttcggactgacggccggcgtgtcggtgaagagcttccggcagctgcgtggtacaccgctggacatgttcacaaagttcccggaccgagtgtttctggcatcgctcgcggaggtgcaaccgtccgccgtccgatcgcccaaggacgtttggatggaggaaacgatcaagcacttccggcagctcgtacacggccagcagttcgacgtggaggtgtactcggtggtgaaccgcgtcacgatggtggtactgcgccacaatccggacgatccgatcgacctgaccgtcaaccgggcgctgatcaattcgcaccacgcgcaactgtccgaggaatcgtacatgtccaagatgaaccacgagaagcgaaagcgtgtacagttcgagatggaactggacccaatgtacaagacgcagatactgaacgacatttccgaacagcaacgcttcctggaggatgacgacgtggacagcctggagctgccgcgggatctgctcaaggtgcggctaatgctgcgcggtccgtacagcccgctcgaggtgaagtgtagctcgacggtgttctccggctatcggaagccggtcattatcgagaaggagtcgctgaactcggtgctgctcgacacgaacccgcaaaacacgcacgaaaagctgctggtggcgggttgcgtaaacgaaacgtccaacagccggctgatcgcgcgtatgacgaccatgatgccgaacattcccggactgcccgcgctgatgacgctcatctttgcgcccacctgtctggtgaagaaggatccggacgagacgcgtgtcgtggggctgctggccgggctgggcacggatccgcgcaccggtgaatcgatgtatcccgagcatgacatgtcactggcagtggacattgctatagacgacgacgacattgcagacatcaatgcactgcgctatacaatggactcaattctgcacggcggacataacgagcagacacccatgtttggcgagtacagcatcgagtcgctgatggtgaaagtgaaagattatctgatcaaaatattgcagcgtgatcgacccattcaggacaatcgcagtatggcacacgatttcagctgggtaaaggaaaatccatccacaagcacgtcgagccagaagcgtttgcgaagcactgcgatcgatatctacaccaaagcaatcttcccactgtaccacaatcttaacctccgtccaatgacggccgatcggatggagttcctgcggcagcactgcaaggatctacacctgctgacgcaatcgcgagttccgttgccaaaaggtggcattacgtgccgtctgtgcaatgtgacgctggaatcggaccacacgttgcgcatccatttctactcgaagctacactgcgatctggagttgaagatcaactaccgacgctgagatgtgtaaacgtcacacgcgtccacatcgccaccgatcatttcgtatgtttgttttacttgttttgtttacttttatttctctttccacaatttattaacatacttcgggcatttttgttttgtttaccaaagtaattacgcgacaaaaggtatgcacagttaccttttctttatagatattattttgtgctacaatcgtttaaaaccattcccacagactttaatgaacaaattatgcatttctgacacttttttgcctttaaattctattatgattgtgacggggagtttacaaagatataacgaaacaatacaaacgagattagttagcaatcgtgcaaatgcgctaataccattgtgatgaattttgatatgcaatatcaactttagtgccgtcgaatttgacaaatttataccatagtgaggatattatttttttcctgagaatattaaaatgacgaattatgaaagcattcaaacgatacatttgttgaattatgattcttttttttccgaaaccttaaatacaa

SEQ ID NO: 131 - DNA, 312 bp, Aedes aegypti
atgaccggccgtggcaagggaggcaaaggactcggaaaaggaagcgccaagcgtcatcgcaaggttttgcgtgataacatccagggtatcaccaagcccgcaatccgtcgtctggctcgtcgtggaggagtcaagcgtatctccggacttatctacgaggaaactcgtggtgtgttgaaggtgttcctggaaaacgtcatccgtgatgccgttacctacactgaacacgccaagcgtaaaaccgttaccgctatggatgttgtctacgctctgaagcgtcagggacgcaccctgtacggtttcggaggttaa

SEQ ID NO: 132 - DNA, 312 bp, Aedes aegypti; identical to SEQ ID NO: 131

SEQ ID NO: 133 - DNA, 312 bp, Aedes aegypti
atgaccggccgtggcaagggaggcaaaggactcggaaaaggaggcgccaagcgtcatcgcaaggttttgcgtgataacatccagggtatcaccaagcccgcaatccgtcgtctggctcgtcgtggaggagtcaagcgtatctccggacttatctacgaggaaactcgtggtgtgttgaaggtgttcctggaaaacgtcatccgtgatgccgttacctacactgaacacgccaagcgtaaaaccgttaccgctatggatgttgtctacgctctgaagcgtcagggacgcaccctgtacggtttcggaggttaa

SEQ ID NO: 134 - DNA, 312 bp, Aedes aegypti; identical to SEQ ID NO: 133

SEQ ID NO: 135 - DNA, 312 bp, Aedes aegypti; identical to SEQ ID NO: 133

SEQ ID NO: 136 - DNA, 676 bp, Aedes aegypti
gtagccagctgcttgcgaggagcctttcctccagtagacttacgggcagtctgcttggtacgagccattgtatgatggtgaagtttgttttacaatccaaacgaatgcgttgaaacgaggcgaaataatgagggtcgaaaactcgacgtctacttttatatgcttgtttcgacgcaggcaaccaatcagaagccccgaaagaataggaaaagcaagaatggcaagaagaaagcacccctcgtgcgggtataaaagtggcagtccgccagcggaaggcatcagtttcattacaaccgtagtcgaacaccgaactaaacatacaaaatgactggccgtggtaagggaggcaaaggactaggaaaaggaggcgctaagcgtcatcgcaaggttttgcgtgataacatccagggtatcaccaagcccgccatccgtcgtttggctcgtcgtggtggagtcaagcgtatctctggtcttatctacgaggaaacccgtggagtgctgaaggtattcctggaaaatgtcattcgtgatgctgttacctacactgaacacgccaagcgtaaaaccgtaaccgccatggatgttgtctacgctctgaagcgtcagggacgtactctgtacggtttcggaggttaaatcgtatccatatttccgctctcaaaacggcccttttcag

SEQ ID NO: 137 - DNA, 312 bp, Aedes aegypti
atgactggccgtggtaagggaggcaaaggactaggaaaaggaggcgctaagcgtcatcgcaaggttttgcgtgataacatccagggtatcaccaagcccgccatccgtcgtttggctcgtcgtggtggagtcaagcgtatctctggtcttatctacgaggaaacccgtggagtgctgaaggtattcctggaaaatgtcattcgtgatgctgttacctacactgaacacgccaagcgtaaaaccgtaaccgccatggatgttgtctacgctctgaagcgtcagggacgtactctgtacggtttcggaggttaa

SEQ ID NO: 138 - DNA, 676 bp, Aedes aegypti; identical to SEQ ID NO: 136

SEQ ID NO: 139 - DNA, 312 bp, Aedes aegypti
atgactggtcgcggcaaaggaggcaaaggtctaggaaagggaggcgccaagcgtcatcgtaaggtactgcgtgataacatccagggtataacgaagcccgccattcgtcgtctggcccgccgtggtggtgtcaaacgtatttccggtctgatctacgaggaaacacgaggcgtactgaaggtgtttttggaaaacgttatccgtgatgccgtcacctatacggaacatgccaagcgcaagacagtcaccgccatggatgtggtttacgctctgaagcgccaaggacgtacactgtacggtttcggaggttaa

SEQ ID NO: 140 - DNA, 312 bp, Aedes aegypti
atgactggccgcggcaaaggaggcaaaggtctaggaaagggaggcgccaagcgtcatcgtaaggtactgcgtgataacatccagggtataacgaagcccgctattcgtcgtctggcccgccgtggtggtgtcaagcgtatttccggtctgatctacgaggaaacacgaggcgtactgaaggtatttttggaaaacgttatccgtgatgccgtcacctatacggaacatgccaagcgcaagacagtcaccgccatggatgtggtttacgctctgaagcgccaaggacgtacactgtacggtttcggaggttaa

SEQ ID NO: 141 - DNA, 676 bp, Aedes aegypti; identical to SEQ ID NO: 136

SEQ ID NO: 142 - DNA, 676 bp, Aedes aegypti; identical to SEQ ID NO: 136

SEQ ID NO: 143 - DNA, 375 bp, Culex quinquefasciatus
atgactggccgcggcaaaggaggaaagggtctcggaaaaggaggagccaagcgtcatcgcaaggttttgcgtgataacatccagggaatcaccaagcccgccatccgtcgtctggctcgccgaggcggtgtcaagcgtatctccggtctgatctacgaggaaacccgtggtgtgctgaaggtgttcctggaaaacgtgatccgtgacgccgtcacctacaccgaacacgccaagcgtaagaccgtcaccgccatggacgtcgtctacgctctcaagcgccagggacgcactctggccaccacaacaatcaagaaagagtttgatcgacgaaaaaattctcccaaaaacaaaccaaataccgccgtacttctctga

SEQ ID NO: 144 - DNA, 354 bp, Culex quinquefasciatus
atgtatcacttgaactttaaaacatcaaggagctcaactaagatgactggacgcggcaagggaggcaaaggactcggaaaaggaggcgccaagcggcatcgcaaggttcttcgtgataacatccagggcatcaccaagccggccattcgtcgtctggcccgtcgtggcggtgtgaagcgcatctccggtctgatctacgaggaaactcgcggtgtgctgaaggtgtttctggaaaacgtgatccgtgatgcggtcacctacaccgagcacgccaagcggaagaccgtcacggccatggacgtcgtgtacgccctgaagcgccagggacgcacgctgtacggtttcggaggataa

SEQ ID NO: 145 - DNA, 312 bp, Anopheles gambiae
atgactggaagaggaaagggaggaaaaggtctgggtaaaggaggagccaagcgtcaccgaaaagtgctgcgggataacatccagggcattaccaagcccgccatccgccgtttggctcggcgcggaggagtgaaacgtatctccggtctcatctacgaggaaacccgtggcgtcctgaaagtatttctggagaatgtgattcgtgatgcggtcacttacactgaacacgccaagcgtaagaccgtcaccgctatggatgtggtgtatgctctgaagcgtcagggccgcactctgtacggttttggaggttaa

SEQ ID NO: 146 - DNA, 312 bp, Anopheles gambiae
atgactggaagaggaaagggaggaaaaggtctgggtaaaggaggagccaagcgtcaccgaaaagtgctgcgggataacatccagggcattaccaagcccgccatccgccgtttggctcggcgcggaggagtgaaacgtatctccggcctcatctacgaggaaacccgtggcgtcctgaaagtatttctggagaatgtgattcgtgatgcggtcacttacactgaacacgccaagcgtaagaccgtcaccgctatggatgtggtgtatgctctgaagcgtcagggccgcactctgtacggttttggaggttaa

SEQ ID NO: 147 - DNA, 312 bp, Anopheles gambiae
atgaccggccgcggcaagggaggaaaaggactgggcaaaggcggagcgaagcgtcatcgcaaggttcttcgtgataacatccagggcatcaccaagccggccatccgccgtctggctcgccgtggtggagtgaagcgtatttctggcctgatctacgaggagacgcgtggcgtactgaaggtgttcctggagaacgtgatccgtgatgccgtgacgtacaccgagcacgctaagcgcaagaccgtcaccgctatggatgttgtctacgcgctgaagcgccagggccgcacactgtacggtttcggaggttaa

SEQ ID NO: 148 - DNA, 312 bp, Anopheles gambiae; identical to SEQ ID NO: 146

SEQ ID NO: 149 - DNA, 312 bp, Anopheles gambiae; identical to SEQ ID NO: 146

SEQ ID NO: 150 - DNA, 312 bp, Anopheles gambiae
atgaccggacgcggcaagggaggaaaaggactgggcaaaggcggagcgaagcgtcatcgcaaggttcttcgtgataacatccagggcatcaccaagccggccatccgccgtctggctcgccgtggtggagtgaagcgtatctctggcctgatctacgaggagacgcgtggcgtactgaaggtattcctggagaacgtgatccgtgatgccgtgacgtacaccgagcacgccaagcgcaagaccgtcaccgctatggatgttgtctacgcgctgaagcgccagggccgcacactgtacggtttcggaggttaa

SEQ ID NO: 151 - DNA, 312 bp, Anopheles gambiae
atgaccggtcgcggcaagggaggcaagggactgggaaagggaggagccaagcgtcatcgcaaggtgctgcgcgataacatccagggcatcaccaagcccgccatccgccgtctggctcgccgtggcggcgtgaagcgtatctccggcctgatctacgaagagacgcgcggtgtgctgaaggtgttcctggagaacgtgatccgcgatgcggtcacctacaccgagcacgccaagcgcaagacggtcacggcgatggatgtggtgtacgctctgaagcgccagggccgtacgctctacggattcggaggttaa

SEQ ID NO: 152 - DNA, 312 bp, Anopheles gambiae
atgaccggtcgcggcaagggaggcaagggactgggaaagggaggagccaagcgtcatcgcaaggtgctgcgcgataacatccagggcatcaccaagcccgccatccgccgtctggctcgccgtggcggcgtgaagcgtatctccggcctgatctacgaagagacgcgcggtgtgctgaaggtgttcctggagaacgtgatccgcgatgcggtcacctacaccgagcacgccaagcgtaagacggtcacggcgatggatgtggtgtacgctctgaagcgccagggccgtacgctctacggattcggaggttaa

SEQ ID NO: 153 - DNA, 375 bp, Aedes aegypti
atgtctggccgcggcaaaggaggcaaagttaagggaaaggcaaagtcccgttccaaccgggcaggattgcagttcccggtcggtcgtatccaccgtctgctcaggaagggcaactacgccgagcgagttggtgctggcgctccagtctacttggctgccgtcatggaatatctggctgctgaagttctggaattggcgggaaacgctgctcgtgataacaagaagaccagaatcattccccgtcatctgcagttggccatccgtaacgatgaggaattgaacaaactgctgtctggcgttaccattgcacagggtggtgtgttgccaaacattcaggctgttctgttgcccaagaaaaccgaaaagaaggcctaa

SEQ ID NO: 154 - DNA, 375 bp, Aedes aegypti
atgtctggccgtggcaaaggaggaaaagttagggcaaaggcgaagactcgttccagccgtgccgggttgcaatttccagtcggtcgcactcatcgtctactgaggaaaggcaattacgccgaacgcgttggtgctggtgctcccgtctatttggctgcggtgatggaatatctggccgctgaagttctcgagttggcaggaaatgccgcccgtgataacaagaaaactaggatcatcccccgtcatttgcagttagccatccgcaatgatgaggaattgaataaactcttgtccggcgtgacaattgctcagggcggagtgttgccgaacatccaggccgtgctacttccgaagaaaaccgaaaaaaaggcctaa

SEQ ID NO: 155 - DNA, 375 bp, Aedes aegypti
atgtctggccgcggcaaaggaggcaaagttaagggaaaggcaaagtcccgttccaaccgcgctggattgcagttcccagtcggtcgtattcaccgtctgctccggaagggcaactatgccgagcgtgtcggtgccggcgctccagtctacttggctgccgttatggaatatctggccgctgaagtgctcgaattggcaggaaacgctgcccgtgacaacaagaagaccagaatcattccccgtcatctgcagttggccatccgcaacgacgaagaattgaacaagctgctgtccggtgttaccatcgcccaaggtggtgttctgcccaacattcaggctgtcttgctgccgaagaaaaccgaaaagaaggcataa

SEQ ID NO: 156 - DNA, 375 bp, Aedes aegypti; identical to SEQ ID NO: 153

SEQ ID NO: 157 - DNA, 321 bp, Aedes aegypti
aagtcccgttcgagccgtgctggcttgcagtttccagtcggtcatattcaccggctgctcagaaagggcaactatgccaagcgtggtgccggtgctcccgtttatctgtccgccgtgatggaatatatggcagctgaagttctcgagttggcaggaaacgccgcccgggataacagaatcatcccacatcacctacagctggccattcggaacgatgaggaactaaacaaactcttgtccggagttaccattgctcagggaggtgtgctgccgaacatccaggccgtgctgctacccaagaaacccgagaagaaggcttaa

SEQ ID NO: 158 - DNA, 375 bp, Aedes aegypti; identical to SEQ ID NO: 153

SEQ ID NO: 159 - DNA, 375 bp, Aedes aegypti; identical to SEQ ID NO: 153

SEQ ID NO: 160 - DNA, 375 bp, Aedes aegypti
atgtctagccgtggcaaaggaagaaaagttggaacaaaggcgaagtcccgttcgggccgtgctggcttgcagtttccagtcggtcgtattcatcgtctgctcagaaagggcaactatgccgagcgcgttggtgccggtgctcccgtttatctggccgccgtgatggaatatctggctgctgaagttctcgagttggcaggaaacgctgcccgggataacaagaagtccagaatcatcccacgtcacctgcagctggccattcggaacgatgaggaactaaacaaactcttgtccggagtgaccattgctcagggaggtgtgctgccgaacatccaggccgtgctgctacccaagaaaaccgagaagaaggcctaa

SEQ ID NO: 161 - DNA, 375 bp, Aedes aegypti
atgtctggccgcggcaaaggaggcaaagttaagggaaaggcaaagtcccgttctaaccgcgctggattgcagttcccagtcggtcgtattcaccgtctgctccggaagggcaactatgccgagcgtgtcggtgccggcgctccagtctacttggctgccgttatggaatatctggccgctgaagttctcgaattggcaggaaacgctgcccgtgacaacaagaagaccagaatcattccccgtcatctgcagttggccatccgcaacgacgaagaattgaacaagctgctgtccggtgttaccatcgcccaaggtggtgttctgcccaacattcaggctgtcttgttgccgaagaaaaccgaaaagaaggcataa

SEQ ID NO: 162 - DNA, 375 bp, Aedes aegypti
atgtctggccgcggcaaaggaggcaaagttaagggaaaggcaaagtcccgttccaaccgcgctggattgcagttcccagtcggtcgtattcaccgtctgctccggaagggcaactatgccgagcgtgtcggtgccggcgctccagtctacttggctgccgttatggaatatctggccgctgaagtgctcgaattggcaggaaacgctgcccgtgactacaagaagaccagaatcattccccgtcatctgcagttggccatccgcaacgacgaagaattgaacaagctgctgtccggtgttaccatcgcccaaggtggtgttctgcccaacattcaggctgtcttgttgccgaagaaaaccgaaaagaaggcataa

SEQ ID NO: 163 - DNA, 416 bp, Aedes aegypti
tcgatattgacagtatgtctagccgtggcaaaggaagaaaagttggaacaaaggcgaagtcccgttcgggccgtgctggcttgcagtttccagtcggtcgtattcatcgtctgctcagaaagggcaactatgccgagcgcgttggtgccggtgctcccgtttatctggccgccgtgatggaatatctggctgctgaagttctcgagttggcaggaaacgctgcccgggataacaagaagtccagaatcatcccacgtcacctgcagctggccattcggaacgatgaggaactaaacaaactcttgtccggagtgaccattgctcagggaggtgtgctgccgaacatccaggccgtgctgctacccaagaaaaccgagaagaaggcctaaaatcatctgtcattatcgaatatccac

SEQ ID NO: 164 - DNA, 375 bp, Aedes aegypti; identical to SEQ ID NO: 161

SEQ ID NO: 165 - DNA, 375 bp, Aedes aegypti; identical to SEQ ID NO: 161

SEQ ID NO: 166 - DNA, 375 bp, Culex quinquefasciatus
atgtccggccgtggcaagggaggcaaagtcaagggagcgtccaagacccgctcgagccgtgccgggctgcagttcccggttggtcggatccaccgtctgctgcggaagggcaactacgccgaacggatcggtgccggtggtccggtctatctggcggccgtcatggagtatctggccgcggaggtactcgagctggccggaaacgccgctcgggacaacaagaagacccgcatcatcccacggcacctgcagctggccatccggaacgacgaagagctgaacaagctgctgtcgggagtgaccatcgcgcagggcggcgtcctgcccaacatccaggctgtgctgctgcccaagaagacagagaagaaggcttaa

SEQ ID NO: 167 - DNA, 393 bp, Culex quinquefasciatus
atgtctggacgtggcaagggaggaaaggtgcgtgccaaggctcggtcccggtcggtccgcgctggattgcagtttcccgtgggtcggattcaccggttgctgcggaagggaaactacggtgaacgcgtcggatcgggtgccccggtgtatctcgctgcggtgatggaatacctggcggcggaaattctcgaactcgccggaaatgccgcccgggacaacaagaagacgcgaatcatcccgcgccatctgctgttggctatccggaacgacgaggagctgaacaagttgctgtcccacgtgaccatcgcccagggaggagtactgccgaacattcaggcggtgctgttgccgaagaaaacggagaagaaggcgcctgtggcagcctctgagtag

SEQ ID NO: 168 - DNA, 375 bp, Culex quinquefasciatus
atgtctggccgcggcaagggaggcaaagttaagggaaaggcaaagtcccgctcgaaccgtgctggtctgcagttcccggtcggccgtatccaccgtctgctccgcaagggcaactacgccgagcgtgtcggtgccggagcccccgtgtacctggctgccgtgatggaatatctggctgctgaagtgctggagttggcaggaaacgccgcccgtgacaacaagaagacccgtatcattccgcgtcatctgcagctggccatccgtaacgacgaggagttgaacaaactgctgtcgggtgtgaccatcgcccagggtggtgtgctgcccaacatccaggccgttctgctgcccaagaagaccgagaagaaggcttaa

SEQ ID NO: 169 - DNA, 468 bp, Culex quinquefasciatus
cttcgttttcgcttgtgacacgtacgttacccctctaccaaactaactcaacatgtctggccgcggcaagggaggcaaagttaagggaaaggcaaagtcccgctcgaaccgtgctggtctgcagttcccggtcggccgtatccaccgtctgctccgcaagggcaactacgccgagcgtgtcggtgccggagcccccgtgtacctggctgccgtgatggaatatctggctgctgaagtgctggagttggcaggaaacgccgcccgtgacaacaagaagacccgtatcattccgcgtcatctgcagctggccatccgtaacgacgaggagttgaacaaactgctgtcgggtgtgaccatcgcccagggtggtgtgctgcccaacatccaggccgttctgctgcccaagaagaccgagaagaaggcttaaatcgcaccactctcagatctcagaaatacgcgccaccaaac

SEQ ID NO: 170 - DNA, 468 bp, Culex quinquefasciatus; identical to SEQ ID NO: 169

SEQ ID NO: 171 - DNA, 468 bp, Culex quinquefasciatus; identical to SEQ ID NO: 169

SEQ ID NO: 172 - DNA, 468 bp, Culex quinquefasciatus; identical to SEQ ID NO: 169

SEQ ID NO: 173 - DNA, 384 bp, Culex quinquefasciatus
atgtctggacgtggcaagggaggaaaggtgcgtgccaaggctcggtcccggtcggtccgcgctggattgcagtttcccgtgggtcggattcaccggttgctgcggaagggaaactacggtgaacgcgtcggatcgggtgccccggtgtatctcgctgcggtgatggaatacctggcggcggaaattctcgaactcgccggaaatgccgcccgggacaacaagaagacgcgaatcatcccgcgccatctgctgttggccatccggaacgacgaggagctgaacaagttgctgtcccacgtgaccatcgcccagggaggagtactgccgaacattcaggcggtgctgttgccgaagaaaacggagaagaagtcgcctgacgactaa

SEQ ID NO: 174 - DNA, 468 bp, Culex quinquefasciatus; identical to SEQ ID NO: 169

SEQ ID NO: 175 - DNA, 399 bp, Culex quinquefasciatus
atgtctggacgcggcaagggaggaaagctgactgcgaagaagcagacgcggtcgtcgcgggctgggctgcagtttcccgtcggacggatcaaccgattcctgcggaagggcaactacgccgaacgcatcggtgccggcgccccggtctatctggctgctgtgctggaatatctgacggcggaagtgctcgagctgggtgggaacgccgcacgggataacaagaagacccggatcatcccgcgccatctgcagctggccatccgcaacgacgaggagctaaaccggctaatgctcggggtcacgatttcgcagggcggcgtcttgccgaacattcatgcagtcctgctgccgaagaagacccaggagaagcggaagcaggaggaatcggaggcgcattaa

SEQ ID NO: 176 - DNA, 468 bp, Culex quinquefasciatus
cttcgttttcgcttgtgacacgtacgttacccctctaccaaactaactcaacatgtctggccgcggcaagggaggcaaagttaagggaaaggcaaagtcccgctcgaaccgtgctggtctgcagttcccggtcggccgtatccaccgtctgctccgcaagggcaactacgccgagcgtgtcggtgccggagcccccgtgtacctggctgccgtgatggaatatctggctgctgaagtgctggagttggcaggaaacgccgcccgtgacaacaagaagacccgtatcattccgcgtcatctgcagctggccatccgtaacgacgaggagttgaacaaactgctgtcgggtgtgaccatcgcccagggtggtgtgctgcccaacatccaggccgttctgctgcccaagaagaccgagaagaaggcttaaatcgcaccactctcagatctcagaaatacgcgccatcaaac

SEQ ID NO: 177 - DNA, 468 bp, Culex quinquefasciatus; identical to SEQ ID NO: 169

SEQ ID NO: 178 - DNA, 375 bp, Culex quinquefasciatus
atgtccggccgtggcaagggaggcaaagtcaagggagcgtctaagacccgctcgagccgtgccgggctgcagttcccggttggtcggatccaccgtctgctgcggaagggcaactacgccgaacggatcggtgccggtggtccggtctatctggcagccgtcatggagtatctggccgcggaggtgctcgagctggccggaaacgccgctcgggacaacaagaagacccgcatcatcccgcggcacctgcagctggccatccggaacgacgaagagctgaacaagctgctgtcgggagtgaccatcgcgcagggcggcgtcctgcccaacatccaggccgtgctgctgcccaagaagaccgagaagaagacttaa

SEQ ID NO: 179 - DNA, 468 bp, Culex quinquefasciatus; identical to SEQ ID NO: 169

SEQ ID NO: 180 - DNA, 465 bp, Culex quinquefasciatus
atggaattgaaccggcggatcgcccgtggtccgccaaatcaaacgctggcggatcgccagagcggtttggcggtccgccagcgaaccgtcggcgggctgcccagtcaatgtgggaaagttaagggaaaggcaaagtcccgctcgaaccgtgctggtctgcagttcccggtcggccgtatccaccgtctgctccgcaagggcaactacgccgagcgtgtcggtgccggagcccccgtgtacctggctgccgtgatggaatatctggctgctgaagtgctggagttggcaggaaacgccgcccgtgacaacaagaagacccgtatcattccgcgtcatctgcagctggccatccgtaacgacgaggagttgaacaaactgctgtcgggtgtgaccatcgcccagggtggtgtgctgcccaacatccaggccgttctgctgcccaagaagaccgagaagaaggcttaa

SEQ ID NO: 181 - DNA, 468 bp, Culex quinquefasciatus; identical to SEQ ID NO: 169

SEQ ID NO: 182 - DNA, 375 bp, Anopheles gambiae
atgtctggccgtggaaagggaggaaaggtaaagggaaaggcaaagtcccgttccaaccgtgccggtcttcagttccccgttggccgtattcatcgtctcctgcgcaagggtaactatgccgagcgcgtcggtgccggagcacccgtgtatctggcagccgtcatggaatacttggccgctgaagtgcttgagttggccggaaacgctgcccgtgacaacaagaagacgcgcatcatcccgcgtcatctgcagctggccatccgcaacgacgaggagttgaacaagctgctgtccggagtaaccatcgctcagggtggtgtgctgcccaacattcaggccgtgctgctgcccaagaagaccgaaaagaaggcttaa

SEQ ID NO: 183 - DNA, 375 bp, Anopheles gambiae
atgtctggccgtggaaagggaggaaaggtaaagggaaaggcaaagtcccgttccaaccgtgccggtcttcagttccccgttggccgtattcatcgtctcctgcgcaagggtaactatgccgagcgcgtcggtgccggagcacccgtgtatctggcagccgtcatggaatacttggccgctgaagtgcttgagttggccggaaacgctgcccgtgacaacaagaagacgcgcatcatcccgcgtcatctgcagctggccatccgcaacgacgaggagttgaacaagctgctgtccggagtaaccatcgctcagggtggtgtgctgcccaacattcaggccgtgctgctgcccaagaagtccgaaaagaaggcttaa

SEQ ID NO: 184 - DNA, 297 bp, Anopheles gambiae
ttcccggtcggccgtatccaccgactgctgcgcaagggcaactacgcgcgcgtcggagcgggcgcgcccgtctatctggccgcggtcatggagtacctggcggcggaagtgctcgagctggcgggtaacgcggcccgcgacaacaagacgcgcatcatcccgcgccatctgcagctggccatccgcaacgacgaggagctgaacaagctgctgtccggggtgaccatcgcccagggcggcgtgctgcccaacatccaggccgtgctgctgcccaagaagacggagaagaaggcttaa

SEQ ID NO: 185 - DNA, 630 bp, Anopheles gambiae
gtattttcagaacaatacacacgtggaatctgcgtctgtctgtgcagtcacatacacggcactttttacaagttctctttgtgaagcaatccaaccaaccaccaacttctcatcatgtctggccgcggaaagggaggcaaggtgaagggaaaggcaaagtcccgctccaaccgggccggtctgcagttcccggtcggccgtatccaccgactgctgcgcaagggcaactacgcggagcgcgtcggagcgggcgcgcccgtctatctggccgcggtcatggagtacctggcggcggaagtgctcgagctggcgggtaacgcggcccgcgacaacaagaagacgcgcatcatcccgcgccatctgcagctggccatccgcaacgacgaggagctgaacaagctgctgtccggggtgaccatcgcccagggcggcgtgctgcccaacatccaggccgtgctgctgcccaagaagacggagaagaaggcttaagctggggtgtgcggactctgcgtgggatatacatctctatggacacgaacgctttggaaaacaggcctacgacacccgaaacctcgctacgacacaaaacgcccttatcagggcgacgagatgcatttctcaagagctact

SEQ ID NO: 186 - DNA, 375 bp, Anopheles gambiae
atgtctggccgtggaaagggaggaaaggtaaagggaaaggcaaagtcccgttccaaccgtgccggtcttcagttccccgttggccgtattcatcgtctcctgcgcaagggtaactatgccgagcgcgtcggtgccggagcacccgtgtatctggcagccgtcatggaatacttggccgctgaagtgcttgagttggccggaaacgctgcccgtgacaacaagaagacgcgcatcatcccgcgtcatctgcagctggccatccgcaacgacgaggagttgaacaagctgctgtccggagtaaccatcgctcagggtggtgtgctgcccaacattcaggccgtgctgctgcccaagaagaccgaaaagaatgcttaa

SEQ ID NO: 187 - DNA, 2314 bp, Aedes aegypti
atggacgattcggtatccgagcagcagcagagcttctccgcgtcgatggaatttgcgaacagaaagcgccgtcattccgcaactcctagcgatgtccttgaagtagatgagaccagcaatcagtcctcgctcaaaacaacgccttacaaatctcccgcggatcgcgagttccaggaagccatttctcgggatcggctgcgtcgtttggaattcctcgagggacagttttcgcaatttgccaattttgccgaacagcgtaagcaagcacggcctccgaaatttggccgtgtcgctgaggactcgaacaacaacaacagcaagcgcccctttagagcccggaaatcgcatctgcaacgggaggacagtgacaatggcggtcaggaatcgtttcagttcaccgaatcgcccgaattcatcagcggccgaatgcgcaactatcagatcgaagggctgaactggctgatcacgctgttcgagaatggaatcaatgggattttggctgatgagatgggcctgggaaagacgttgcaagcgatttcgatcatcggatatttgaagcattacaaaaaaattaacggaccgcacgtcataatcgttccgttgtctacgatcgaaaactgggaccgtgaatttaaacgcttcctaccgggagtacgagtgctgcgtggacactgccgcggagataagaaagcgttacgcgaagccctaatttcgtctcgtcgaagttgggacgttgtgatcacggcataccatttcttcgttgcggaacatacgtactttaaacagctcaactatcagtacatagtgctggatgaagctcagcgatgcaaaaatgagaaatcgcaactatctcaggcacttcggcgaacgaattatcgtaatttgctgttcatgaccggaacacctatcaacaacaatttgcacgagctttgggctttgttgaatcttctgttgccggattttttccgtaattctgaggattttgatgaatggttcaaggtggaagactgcatcgatccaaaccacgaaagggccgtgaggctaaaaaacatcttgcaacccatcatgttacgacgcatcaaagccgatgtcgaggtggaaattccgcccaaaattaaaacgacccttttcattccgccgacccgccagatgaactactggtccaagaaagtgctctgcagggacgtcagactcttgaaaggagacggcacctataccaagtatatgatgaggaatatatttccccatctgcgtcaggtaactctgcatccttacctgattcctgaggaatcggaggaggagacttttgttactcaagagatagttgacgttagttctcgaatgattgtgttggacaaactactcgacgaacttcacaaacgaggatcccgcgttctgctgttttcgcagatggtcattatgctgaacgtgctggaagattacatggaatggaagggatacaaatatcaccggatgacgggcaccacccaacaggaagaaagacaagcgatgatcgacgaattcaattcgcccggttcggacacattcattttcatgatcaccaccagaactggtggtatcggaatcaaccttcaaacggcggacacggtaattttctatgacctggattggaatcctcaggcagacttccaggccgaagatcgtgctcatcgcattggccagaccaagcaagtccatgtcatccgattcacagtggtcggaacggttgacgaatatgtgcatgtctgttccaatcgcaaacaagccctggataaggccatcgtccgcaaaagtttgggtgatgtcaccgaattcgccgcgattgaccaccaccgcaaaaatctcgaaaacgtcaactgtattgacgtgccagcgatcgacgaacagctgaatgaaatgtttgcggaaatcgatcgaggcgagaggaatagcagggacaacagtctggtgaaaagcatacgtcttaaaactaagctgatgcgatcgccctcggaggaacgtgaactcgacagtattaaaccggctccaccgcaatttgcgccggagtttgagctgcctcggctgcgaccgcgcaagccgaagcaaatgcgctactacgagcagctcgatctcagtcaggagtgagtcgacaaatgacctggacttttatgatattattttgtacctattctaagtttgactcattccagttacccgttaaccagtgccaaacaatactttccgtttacattgaggtttacatcacgcattaccatgattttaccaaccgtacctgaaaaagaaacttttgaatttcaataaacgataagactta

SEQ ID NO: 188 - DNA, 2304 bp, Culex quinquefasciatus
gcccggacaggtcacatcgtgctcgttttcatgtgcgttttcgtcgtctgcgtcgtctggtgaaaaacactttacagtttcgtagcctttaaaaagcggttttccgtgagtatgaactccaccgacagtccgaacgttccggcggtcatcgacccggccccggccgtcagcgagcctaccttgatcggtatttcacaacttcaagaccccggcgatgtttctgcggtggcgtttgaaacggaggaggaacgcgagtaccgggatggcctggagcgcgatcggttaaatcggttagcgtttctggagacgcagttttcggtgtttaacgagtttatcaaggagcgacgcaacggggagccgaaggcgcctgccaggaagccgttggccccgttggatgagaacaataacaacggcgagaagaagcggaccaggcggcacgtaagccggaacaaggaggaggcggaggttgaggcgttgccttattttacggagtcgccgccgtttatcaagaacggggtgatgaggccgtaccaggttcagggcttgaactggttgatttcgttgtacgaacggggaatcaacgggattttggcggacgagatgggcctgggaaagacgctgcagagcatttcgattctgggctatttgaagaatcacaagaacattaaagggaagcacattgtgattgttccgctgacgacgatcgacaactggatgcgggagtttgcgcgttttctgccggaattgcgcatcctgcgaggtcactgctacaagccggacaagaaagcgttcttcgaaaatcttgcctcgaacaagtgggacgtggtcgttacgaattacgactttttcgtatcgtcgtttaacaagttcaaacagatcaactatcagtacgtgattctggacgaggctcagcgcagcaagaacgagcatacccggctggcgcggttcatgcgacagctcactcaccggaacatgctgtttctcaccggaacgcccgtcaacaacaaccttcacgagttgtgggcgttgctgaacttgctgctgccggagttcttccagaacgcggacgatttcgactcgtggttcaagatggaagactgcatcgatccgaaccacgagcgggccgtcaggctgaaatcgatcctggaaccgatcatgctgcgccggatcaaggccgacgtcgaggctggcttgctgcccaagatgaagacaacgctttttatgccgcaaacgcgcactcaacggtactggtccaagcgggtactctgccgggacgttccgctgctcaaaggagacgggacctacgtcggcatgacaatgggcatgctgtttgtgtacctgcgagaaatcaccatccatccgtacatgattccgccggcagacccggactccaactcgctcggtcaacacctggtcgactcgtgctctcggatgatcgttctggacaagctgctgaccaggctgaaggcacgtggctcacgcgtgctgcttttctctcagttcgtcctgatgctcaacatcctcgaggactatctcgtctggaagggttacaagtactcacgactcaccggcacgaccccgcaggaaacgcgtcaaaagatgatcgacgagttcaactcccccgggtcggaaacgttcatcttcatgatcacaacgcgttccggcggactcggcatcaacctgcccaccgccgacaccgtcatcttctacgacctggactggaacccccaggcggactttcaagccgaggaccgcgcccaccgaatcggtcagctcaagcaggttcacgtgttccgctttgtcatcctgggcacggtcgacgaagccgtgtacggccactcccagcgcaaaactcaactcgacaaagcgatcgtcaagaagagtctcggcgatgccgacacccaacacgcggtcgaataccaccggcagcagctcgagtccggccaaaacatggacccgacggccgtcgatggcaagctcgatgaaatcttcgcccaaattgacggcggcgaacgcaacgcagcactcggcaatctctgccaggagattcacctgaaggcgctccgcaagcgaacgctgtccgaggacgaagcgctcgaggcgatcaaaccaccggcgaagaagccgaaaccggagctggatctcaccagcggctatcgctacaggccgcgccgggccaagaaggtgtgggtgcccaagcaggacacggacgtggtggtaaagctggccaagagcgataccgccgacagtattccggtgccggagccgaccaacagcgacaaggactggcagccggaggtgtag

SEQ ID NO: 189 - DNA, 1860 bp, Anopheles gambiae
aagccgcgctaacttgatcattcctgtacccgtagtgttgatgtgactctgtgtgttaaacgtttcgtcaaaatgcaatcccctgtaaatgattctgctccatcgtcgccggtcgacgagaatgtgttgatcgaaaagacggctttcaaagaagagctgagccgtaaacgacagctgcagctggaggcactggaaaaaaagctagcgggttttgcaaaattcagccaagaacattccaaaaaaaaggcacagccaactaatggtaaaagaaagctgaaaagcattgaaaatttgcgtaaagatgactatgacaacaataacaacgaggatgcgatcgagttcacggaaacgccgtcctacatgaacgccgtaatgcgcgattaccaaatcgcagggctcaactggctaatttcgctctacaacaataatctgaacggcatactggcggacgagatggggctgggaaaaacgattcagtcaatttcgatgattgggtatctgcttaacgtacgtaagctaaaaggaccgttcctggtggtagtcccgctttcgacgctgcccaactggttgaatgagttcaacaagttcctgccgggggctaaagtgcttcgcgcacacatggtcggtccgcagaagacggaaatttttaggaaattgcgcgcgtcgaaaccgacttggaatgttgccatcacatcgtacgagttcatggcaaataaccgcgggagcttcacatcgactaacttccattacgccattattgacgagggccaccgggcgaagaacgaaaacacgatatttgccggcgtgctgcgacgctgcaagatccagagcatggtgatgttgaccggtacgccggtgcacaacaatctgcacgagctgtgggcactgctgaacctgctgatgccactgttctttaacagtgcggacaatttcgactcctggtttaaggtagaggactgtgtcgatccgaagcacgagcagacgattcggttgaagaagctgctgaaaccgttgctactgcgacgcaccaagaaggaggtgaccagcgatatcccgcccaaggtgcacattgacatctacgtgcccccgaccgagcaaatgtgcttgtggacacacaaagtgttgcatcgcgaggtgaagctgataatgggttccggggagacgaaggaaatgaggatcgctagtcgactgccacacatgcgcaaagttattcaacatccatacttaattccgggggcagaaaatctgaatacgaacctggttaccgacgaaattgtgcagttcagttcgaaaatgatagttcttgataagctgctggcaaggctgcgagcgcgtggctcgaaggttctaatatttagccagtttgttacggtgctgtacctgctgatggactatctggattggcgcgagtacgagtactgtatgctggaaggtcacaccgacatcgctgagcggcaggaacagatgaacgagttcaatcggcccgattcgaccaagtttgtctttctgctgtcgacccgtgccggtggtctcggcatcaacctaccggcggccgacaccgtcatcttctacgacatggacttcaatccccagatggacttccaggcggaggatcgagcgcatcgtatcgggcagcagcgaaaggtgcacgtgtttcgattgctggtgcgcggcagcatcgatgagctgctttacctacattccgagcgcaaacggcagctggacgaggcggtcatccggacggagaccaaaccgtccaagaagttgctgatgtcggcttacgagtatcagcgcacttccctcatggctgacgggctgatcgatgaagcggccgtagacacgaagctagacgagctgttc

SEQ ID NO: 190 - DNA, 1297 bp, Aedes aegypti
agtcagataacaagtgaaccattcacataataggtaattacattcttttatttgatttcgttatcagacaacagattcagtccgtaaagtacttcacgcgatcttgtaatccttctagcaaaaaaaaaaaacgtgttgacatcaaccaattggaaacgatgagtgcctctaccggagcccgggacctttcaaagctaaatgtgggttttatcggtggtggaaacatggcttatgccattgctgctggactatttagaacgggtgttctgcagccaaaccaagtaattgtttcggctaccaatttgaacaatttgagagtacgttggaatccgttgggtgtcactagagtaaccacgagcaatgcacaggtgctacaagaggcagaaatagtgtttctctgtgttaaaccgcatgttctaccggcatgcaaggagtccattctagttgaggccgagtcgattcaacatctggcctctcactgccatgaaaaagttatggtttcaattttggctggcgttaccttagcaaggttgaaggataggttttcgtttttgaacatacaacacgtgcgcacgatgcccaacacaccaatgcaagttggagccggctgtactatatatagtgcaggtttcggaaaacattgtccagggattgttctcagctattatgaagacatcaaatttatgctgaaccagctaggtttggcatatgaagtgaacgaagcacagatggatggtatcactggccttactggatgtggtcctgcctttgtctacgaaattatcgaagcgctagctgatggaggggtgaagcagggtattgctcgcgacatggctcttaagatggcagcacaaacagttatgggagctgcaaaaacagtactggaaactggaaagcatccggctgtgcttaaggacgaggtctgctccccgggaggagctaccattcatggtgtacatgagctcgaaaaaggtgcgatgcgagcaacgttgatgaacgcagtagaaaaatctgctgctcgagcaaaagaactctcttaaatgttttgtgactgtaccaactgtaccttaatccaacttacagcaatggtcgtattgtttatgttgaaattgtctctaatagaattacaataatagctcatacttcaaaaaaataagtgttttaaagagaaagcctagacttacatgcaaaagttcattgttgagtatttaagtcatcacgaccagttgttagatctattgtgacacctatcctatcttacatagctttttcaaatacacgtatcatcacttatcac

SEQ ID NO: 191 - DNA, 867 bp, Culex quinquefasciatus
atgagcagcggaaccggttcgcgggacttgtccgccctgacggtgggcttcattggcgcgggtaacatggccttcgccatcggatccggactgatcaagcaaggtgtcctgaaggccaaccaggtgattgtgtccgccacgaacctggagaatttgcgcaagcggtgggctccgctcggggtgaccagcgccactacggacaattccgaggtgatccggaaggcggacataatcttcctctgcgtgaagccgcacattttgccggtgtttgcgaaatcgatcgagggcaaactggctggggttgattgcagtgaaaaggtgctcgtgtcggtgctggccggtgtgaagcttgaccggttgaagtcggaattcgccagcttgggaattaaccacgttcggacgatgcccaacacgccgatgcaggtcggtgccggttgtacgatctacagcgagggattcggggtagattgtccgaaaacggttcgcgatcgttacgaggacatcaagtttatgctgaaccagcttgggctggcgtacgaagttcgtgaggatcagattaacggcataactgggttgaccggttgtggtccggcgtacgtgtaccagattatcgaagcgctggctgatggcgccgtgaagcagggtgccgctcgggatcaggctatccggatggcggcgcagacggtgatgggagcggctaagacggtgttagagactggcaagcatccggccgtgttgaaggacgaggtttgttcgcccggcggagccacaatccacggcgtgcacgagcttgagaaaggtggccttcgagctacactcatgaatgccgtggaaaagtccgccaaccgggcaaaagagttgcagtag

SEQ ID NO: 192 - DNA, 1236 bp, Anopheles gambiae
gggtcgcggggacggcaaacgtagccagacagcaaaaaaaaacgaaggcaaagattatctttcgtcggcggaaaagtgcgcgtcgcgtttgttagataacctcccgatacgaaaacacttgtcgcgttgatatacaagcgcgacgcgtgtgtgttgattgtttatcgtcaacattgtcgcgcccctggccctgaagttgcgcgtgtaggtgaatcgaaaaccgaccacaatcaatttggaaccgatttccacggaactaattccggccaggcaaaatgtcgtcctctgctgcactacaaaagtgcaaagcggtcggtttcattggtggcggtaatatggcatacgccatcgcgtccggattgttgagcaaaggagtgctgcaaccggatcagattactgtgtccgccacacggctggaaaatctgcaggcacgctgggccccgcttggggtaacgcgaacgaccattgacaacgcggaagtcatcctgcaatcggacgtcgttttcatctgcgtaaagccacagatgttcgaccacgtgttgaaagacttggcaaagttgaagcaaacgtttaaaacagatgaatccaaccagaagctgtacgtttctataatggccggcgttacgcttggtcgactggagcaggggctggcgatgtttcagccatgcttgatagcccgtgccatgcccaacactccgatgcaggtcggtgttggctgtacggtgtactgtcgcacgggatcggaccatcctgtcccgccactgtaccgcgatatgcacaccatgtttgcggcgctaggcgttgtgcacgaggtggaggaaagtaagatgaacgccgctaccgggctggccggctgtggtccggcgtatgtgtacgagtttatcgaagcgctggcggacggtggcgttaagcagggcattccgcgtgacatggcgctgcagctggccgcccagacggtgatgggtgcggccaagacggtactggacacgggtaagcatcccgccgtactgaaggacgaggtgtgctcgcccggcggtgcaacgatacacggggtacatgcgctcgagcaaggttcgatgcgaggcacggtcatgaatgcggtcgagagtgccactaaacgggctgcagagctttcttagaatgctttgtttgagtataactcataccatgccattgtttttatcatattcatcaatataaagacaaataaatagatcctttttttctgatatggtt

SEQ ID NO: 193 - DNA, 2056 bp, Aedes aegypti
tccaggaaatatttgcttcaacgatatcgttgccaattgccgcttggtaccgttgaacaataccgaaccatctatcccatacaacttgggtgcacgtgatcggcgtcagcatcgatcagttttggcgcctgattgttcggcaaacaagcgcaccaacatgtcgagtaaatcgaaaaagtccgcggccaaaccgacttcgacgtccggtgctcagtcggtgtcctcgtccgcttcctccgtgtccagcatgacggaatcctcggaaaccgccctcagtccatcgcgccgcagtcgattacacgagaagaacagtctcatgaacttaaatgaccgtcttgcgtgctacattgaacgcgttcgctttttggaacaagaaaactcaaaactgtcgctggagttatcctcctgccaggaaacagccctccgcgaggtggccaatctcaaggcgatctacgagaatgaacttgccgatgcgaggaaacttcttgacgaaactgcacgcgataaggccaaggtcgaaatcgacgccaaacggtactgggaagaaaacgatcaactgagggtgaagctgaacaaaaagatcaaagaactgactgaggtagataaggatgcccgtgcaaacgaggcgagatgtatcgagctgacggcaaactacaacagcgtttgctctgagaagaaaaaacttcaggaagagttacgagaaacagatttggaagcggcaaagttgcggaagttattcgaatccatgcgaaaggatcttgagcatgaaacgttgatccgagtagatttggaaaacaacatccaaagtcttcgcgaagagcttacattcaaggatcaagttcacagtcaagaactttcggaaagtaaaatgcggcgacagaccgaaatcagtgaaatcgacggatatctcatggaccagtacgaaactaagatgcaacaaactcttcaggagcttcgcgatcaatatgaaactcagctgagcgtgaaccgtgatgagatgtccgaactgtacgatactcgcattcagaatttggaaagccgtcttgcccaagaacgcgtccaacacgaagaggagcgtctaaaactcgaaaaggagctgaatcgactgcgggatgagatgactgtccagctcaaggaataccaagatcttatggatattaagatctcgttggatatggagatagcagcatacgatcggttgctatcctcggaagaaactcgcctcaacatcactcccagcgtcaccagcaccacatctgcaggattgagcacttcctcgcgtctgttccgcactccatcctacaaaagaaagcgcacagcaatggacgattctgtggactactccgtcacctcttcggccaagggagacctggagatatccgagtgtgaccccgacggaaaattcatcaaagtgcacaacaagtccaaccaaacacaaaaactcgatggttgtcagatagttcgcaaaactgaatccacggaagtaacgtacaaattccctaaaggagcaaaacttgagggcagctcaacggttaccatttggtcggcttctgccaatcacaaagccgatccaccgagcaatttggttatgaagggccaatcgtgggcctctggggacaacgtgagcacccgcctactggaccaggatggcgaagaggtggcacatgccgagcggattaaaatgaaagcggcggctggttcggctggacctaaggataagtactttctcgaagaaggaggtgccagacttggagtcagtcgatccagtagcttacgatcgccaggaccatcgcgagtcggtcaagaggataaatacgatgaaaggtgtgcaatgatgtaagcttactaggaaggcgtttatcgttaggattaaacacgtatttgtttttgtatttttgcaagttaaatgtaaaagtgaaatgcttcaaggtagcgtgtggatgtattttttgtaaattaagagaagatttaaaataaaattgcataattttatgatcagcaaataaacggaaacgcatataagcaacgaataaaattactagaggagcttactatc

SEQ ID NO: 194 - DNA, 1704 bp, Culex quinquefasciatus
atgtcgcagcgatcgtccaaaaaagcggccaagccgagctccacctccggcgcccagtcggtgtcctcttcggccagcaccgtgtccagcatgaccgaggcatcggacacggccctcagcccgtcccggcgcagccgtctgcacgagaagaacagcctgatgaacctgaacgatcgactggcgtgctacattgaacgcgttcgctacctggaacaagaaaactcgcgactctcgctggaaatggccgcctatcaggagacggccagccgcgaggtgtcgagcctgaagtcgatctacgagggcgagctgggggatgcgcggaagctgctcgatgaaacggcccgcgacaaggccagggttgagatcgatgccaagcggtactgggaggagaacgatcagctgcggatgaagctgaacaagaaaaccaaggagctgacggagttggagcgcgatgcccgagccagcgaagccaagtgtatcgagctgacggcaaactacaacagcgtctgctcggagcggaagaaactgcaggaggagctgaaggagtatgagaaggagtcgacgaagctgcgcaaaacgttcgaaaatatgaggaaggatctggagcacgaaacgctgattcgggtagatctggaaaataacatccaaagtctgcgggaggagctaacgttcaaggagcaggtgcacagtcaggagctgtccgagagcaaaatgcgtcgccagagtgagatcagcgaaatcgatggattcctcatggagcagtacgaaacgaagcttcaacagacattgcaggaactccgcgagcagtacgattctcagctgcgtctgaatcgggacgaaatatccgaactgtacgacgctcggatccacaaccttgagagtcgcctgtcctcagatcgtatccagtacgaagatgaacggcaaaagctggagaacgagatcactcgattgcgtgacgaaatgtccatccagctgaaggagtaccaggacctgatggacatcaaaatctcgctcgatatggaaattgccgcctacgacaaactgctctcatcagaggaaactcgtctaaacatgacgccgaacgtgaccagcacaacggccacggcttcggtgctcagctcaacatcccgcctcttccgaacgccctctctaaagcgaaagcgcaacgtgctggacgagtccctcgactactcaataacctccacagccaaaggcgacctcgagctgtccgagtgtgatccggagggaaagttcgtcaaagtgcacaacaagtccaaacagcagtacaaactggacggctggcagatccagcgcaagacggaatcctccgaagtgaccttcaagtttcccaaaaacagcaaaatcgaaggcaacggcacggtctccatttggtcctccgcatgcggccagaagcccgatccaccaatcacgctggtcatgaccaaggggcaaacgtggaccaccggggacagtacggtcacggtgctggtcaacgccgacggtggcgaggaagcgcactccgagcggatgaagctacgcacgatgaacatctccggccacaaggacaagtactttctcgaggagggaggtgcacggctaggggtgagccattcgatgccagtcggaggaagctccaaatcaccacgaggccagggggaaccgggcacgggcgataagaacgacgagcagtgtgtggtgatgtaa

SEQ ID NO: 195 - DNA, 2243 bp, Anopheles gambiae
cttcattacagatgctgcagaagtgtgtgaagcatcatatcagtagcgaacgtttaaacagttaaaacagttaaaaaactcacaaatgtgacgatcgagtttagtgttttcctttttaatcacttttagtaacaaaaacaaactcctgaattcagacaaacaaaagtaattcgcatcaaaatacgagtgatcgtgcgttagcggacgcgtactttctcgttgaggttaatcccgctgggacgcttccatttttccacaccaacaactgcgcaccaacaatgtcacagaaaatgaagaaaccggccgccaagccatcctccaccaccgcgaccgccaataccaacacgggccatacgcccagcggtgcccagtccgtgtcctcgtccgcctcgaccgtttcgagcgcctcggaatcgtcggaaacggccctcagcccgtcgcgccgcagccgactgcacgaaaagaacagcctcatgaacctgaacgatcggctggcctgttacatcgagcgggtgcgctacctggagcaggagaactcacgcctctcgctcgagctgaccaccttccaggagacggccgcccgggaagtgtccgggctgaagtcgatctacgagcacgagctggcggacgcccgcaagctgctcgacgagacggcccgcgacaaggcaaaggtcgagatcgacgcgaagcgctactgggaggagaacgagcagctgcgcacgaagctgaaccgccggacgaaggagctgagcgagctggagaaggaggcacgggcgaacgagtcgcggtgcatcgagctgaccgcgaactacaacacgctcagctcggagcgcaagaagctgcaggacgagctgagggaggcggacaaggagtcggacaagctgcgccgcacgttcgagaagatgcgcaaggactacgagcacgagacgctggtgcgcgtggacctggagaacaacatacagagcctgcgggaggagctcacgttcaaggagcaggtgcacagccaggagctgagcgagagcaagctgcgacggcagagcgagatcagcgagatcgacggcttcctgatggagcagtacgagacgaagctgcagcagacgctgcaggagctgcgcgatcagtacgagcagcagctgcggttgaatcgggaggagatatcggacctgttcgagggacgcatccgggcgctggaggagcggctggtgctggagcgcacccggtacgacgaggagaaggccaagctcgagcagcagctggacgggatgcggaacgagatggcggtgcagctgaaggactaccaggatctgatggacataaagatttcgctcgacatggagatagcggcgtacgataagctgctgtcgtcggaggaaacgcgcctcaacattacgccgaacgtgacgagcacgagcaccggcggtggttccgcattcacgtccagctcgcgactgtttcgaacgccgtcgttgaagcgcaagcgcaacaatctggacgaatcgatcgactactcggtggtgacgtcggccaagggggacatcgaggtgacggagtgtgatcccgagggacggttcgtgcgcatcgctaacaagtccaagcaggagtacgcgctggccggctggcagttgatccggcggccagtggatggggccgaggttagctatcgcttcccaaagtcggccaaaatcgagggcaacgggatggtgacggtttgggccacggtggcaaacaggaagccggatccaccgacggatttggtgatgaagggtgccctctggacggtgaccgatgccatgtcgacggtgctggtgaacgaggagggtgaagagatggcgctggtcgaacggcaccgtatgatgaagccgcccaaggacaaatacttccaccacgaggagagtggcggccggctaggggtgtacggagcgtccgggctgtcgaaatcaccttcgaacgggtcggaggctgggcgtgttgggaacaaaaacgatgaacagtgtagcgtcatgtgaatgagggtgggcgatgttgggcgcagtagaaagagtaagcggtttggttcctttttgcattcagggttaaagaccgtagtcagtcgttgtgtcattttgtacgtaaaaatgtaaactccaaacgacacgagaagtacacgaggagaagaagctttagtttcaacgttatatagtcaattgtatcgatcaataaatgcatgctaaagatcagtcttgtttgtcttttagcctaaaatg

SEQ ID NO: 196 - DNA, 1407 bp, Aedes aegypti
acagtgatcatttttacttgcaacagaatggtgctagcagcgctcaaagtggccttgttgattggagttttgcacggctctatcacactggcagccgccaaatgtgatggcgtgtgcgtcaaaatggatgaatgtgaaaacactttcggtggggtgaatttcgttaatctaagatttggcgatgaagactacgaggaagctgattgtcctcactacttggagatatgttgcgatttggaccaagttgtaacgactaaagctccattggtggtggatgcagttgttggcggtcagtcgggagaaaaaggtgaccattctggagaagacgacgatcagagacgtagccttaatataggtgaagtaacaagtgaaatccccagggtatcagccgtaaacgaagcatccaaggaaaaaagctccgaggaagtaaaatcagacactaatgagccacaagcacaaagctccgtggaaaacgcggctgtggaaaatccggccattcgtaccgtcgatcaagtcaaacaattcggagaatgtggaatcagaaacccggaaggcatttcgttcaggctaggaaactccaagtccaatgaaaccgaatttggagagttcccatggatggtagcagtcttgcaggctcattctgaagctgaatcagaagtttccacgtacgcatgtggaggttcgctgatcgcgcctaatgtaattttgactgttgctcactgtgtaatggataagcaggcaaatgagttgacagttagagcaggtgaatgggatacaatgactacaaatgagtacatccctcatcaggaacgacaagtatcgtctataattatgcatcctaatttcaatcgaaacctacttttccacgatttggccctgttagttgtagagtcgccttttacggcagatgataatgtgcaactcgcgtgtttgccaccacaaggcatggattttaccagtgaaaactgttttgccgcaggatggggaaaaactgctttcgacgccaagagctaccatgcaatcctcaagagagttccgttgcccatggtccaaagagcgcaatgtcaaaatgctcttagaactacgaagctcggaaaccgattccggctacacgagtccttcatttgcgccggtggtgaggaaggagttgacacctgcacaggagacggcggttctccgcttgtttgcccagttgaaggtactgcgaataagtattaccaagcaggtattgtcgcttggggtattaactgcggccagtccaatgttcccggcgtctacgtccgcgctagcttgtacaccaactggattgatgccgaattgctgaaactaaatttcgtcgctgtagataagcgaaatagtatttaggatgaaataatgtgaataaacaaacatttaaaatgagcaaaa

SEQ ID NO: 197 - DNA, 1361 bp, Aedes aegypti
cagtattgcgttggctttgtagcagtgtagattgtaggttgtttgatctcttgatcgatctgagcttcaaatgaaggtggcattggtagtggctgcaatggccgttgcagttgcaacggctcagcagtcgatcgacaaggtatactttccagaaaatgaaacatcgattctggactttgctaaccgcgcaagttttgacgaagtggtcacaccagatccactagggcctaattcgccgacgctctctccaatgacattaatcactgctcaaggtgaaaaatgtacctgtgtgccgtatttcatgtgcaaacccgaagccgaattcgcagatcaaaacaagtttaacgagattgacgtcaactataatccggacagctgccaggatgtgctggatgtgtgctgtcgcgccgaagattccttggtagtgcccatgaataacacccccggagtagtttcaaacaggaagccccttggatgtggcttaaggaatattggcggtattgatttcacgcttactggaaactttaataacgaagctggatttggcgagttcccttggacggttgccattatcaaaactgccgatagttctagccattgcggaggttcgctgattcaccctaacctggtactgacgggagcacattgtgtgcagggtttccgcagaggccaactgaaaattcgagccggtgaatgggacactcagacaacgaaggaacgtctaccattccaagaacgactggtcacccgagtcaacagccatcctgactacaatccgagaacgttggcctatgatgtagctgttttggaactggaaagtcccatcaatttggccgatcatattaatatcgtttgtttgccacccaacaactacgatacgaggcgatctgattgcttcgccagtggctggggaaagaatcagtttggaaaatcaggtcgctacagcgtaattatgaagaaagtgcctcttccgatcgtagaatcgtcaacatgtgaacgtcaactgcaagcgactcgactcacgtctcgtttccgattgcatcaaacgtttatttgcgctggaggtgaacctggcgttgacacatgcgaaggagatggcggtgccccattggtttgcccagtcggtccagctaatgaaaatcgatatgctcagatgggaatggtagcttggggcattggatgccatggcaaagtcccagcagtttattccaatgtgatgagattccgatcctggattgataacgtggtcaggactcttggtttcgatacatctgtatacgatgctactcaatcacaattttcggggttatttgcataggtttgtagattattagaatatttgaataaacatgacattaagt

SEQ ID NO: 198 - DNA, 2805 bp, Aedes aegypti
atgcttggagtcgtagttcagaatacgactacacataactttccaccactttcagatcggtttttgcattggttgtggaatatacatttgttcaaccccgatgacccttgcgaacattacctgttgaagtgctgtaaagttccgaaagatctagacgataatgaacaggtcattgcgccgccctcatccagcggtgaactcattattgcaccacctagctcatctggaaatctgatccagcctggagcagaggatcgggatgggtcaggatcagcaggaactgattcttctggcggaccaggatctggcggacatggttcgggaggtgctggttctggtggtctgggatcaggtggacaagagaccggagggctaggatctggcggaaccggatcaggtggacttggaaccggtggagttggaccaggaggccatgggtcaatacctggttcgtggtcagaggggcctggaggtaacggtaattatcatggtggtcatcatcaatacggtggtggtaactacgctggtagtgtttcacaaacaattataattactcacatatgggtcagcacggtccttgtatacctggaacgcatactggaaatgttgggggagcgggaaggcccaatgcaggtggctcatctggtcaaatttcgggtagtggatcatttggaggaaccgcaactggaacatctggtcaaagtcaaactgcaacatcgactggtgtatcttctggttcatcgtctggcactatcggtcatgggtcaactcatggatcaacgggacatggtgcaagctatacaggatcttctactggaggagcacctagctcgttgcaaagtccaaatggtcaaacaagccccacaactggtgtgccttctggatctttacacggatcaactggacacggtacatctaccacgggatctactaccactggaagtgcatctaattatacacaaggttcatataatcaaaatcattcatctggacaagcttcccttcaaactggcacttcgaatgttggagagccagacaggctcaacgctaggtggttcgtctagtcatggagcaagccagtcgggttcatccaccggcagcatgcttgcgccactgaaggattcatctgtgcaaaaccaatcaggcccatctactggaacttctactggatcaagcggacccactacacatcagtccggttcatcagctgcaggaggatctgcacagggttcatatggatcatctgggtctacgcatggatcaaccggccaaagtacaagtcaaggttctttcggacaaagtggttcaagtacagcccaaggatcatctggacaaagtggcttcggatctcataatttgaatggtgcaaacttggttgcaggagatttatacagcggaaatattccaactgggtcagctggtagccatggcagcaataccggaggatccgtacaaacgggaagtgtagtgccgggcgttagtaccgtaacaaaagaccaaattagggatacagaaaccacaagtacgggtttatcatccggtacggctcagcagggacacttgtcatcaagccaacagcagtcttcctcgggaggatcacaacaaacttcaagtggcagccacacaaatgtaggcggtcatgaaggtgagggtatgtcatctggtacggctcagcagggacaattgtcttcaagtcaacagcagtctaccactggaggatcacagcaacagcaaacaagtggcagccatacaaatgtaggtggttatggagtatctggtggtacgcaccactcctctgatggatggaaggatcataccgagaagcatggtcatgggcatggtcatagttatggtcaaggtcacggacatggtggtggttatggcaataattatggtggtggatatagtagctcacatcaaaccgatcatactaccgtgtcaccaatcaaatcgcctcatgacaatgcaggatgtggtttccgcaataaagatggcgtaggtttccgcattacgggcaactcggacggagaggcagaatatggtgaattcccctggatggttgcaattttgagagaggagaaagctttggatcaagtcatcaatgtttatcagtgtggtggatcattgattcatcctctagttgttcttacggctgcccattgtgttcagaataagaagcctcatgaaatcaaagtccgacttggagaatgggacacccaaacaacgaacgaaattcatgatcatcaggatcgtaacgtacttgaaatcgttttccatgaaaaattctacaaaggaggtctattcaatgacgtcggattacttttccttgacaagccagctgagattattgagacagtcaataccatttgcttaccgtcacaggattacaatttcgattacagtcgctgcttcgcttctggctggggaaaggacgtgtttggaaaggaaggcaaatatcaagttatcttgaagaaaattgaacttcctattatgccgtacaacgattgccagaaagctctacgaacaactcgattgggagctagattcagtctcaataagagcttcatatgtgccggaggtgagcccggaaaggacacatgcaagggagacggaggttccccacttgtttgtcccatccctggatcagtcgatcgatactaccaagcaggaatcgttgcttggggtattggatgtggtgaaaagggaatccctggtgtttatgctaatgtggctggatttagaaactggattgacgagcagcttacccagcgtagcattccacataatacctatatcgctgtgtga

SEQ ID NO: 199 - DNA, 1522 bp, Aedes aegypti
cgtcgcttctgatcgtgtctgtgtccgcgctgagtttattgcatatatagcgttgtgtatcttctgttattggccacgttagtttttttttctggagaaccatcgtactagcggtcactgtcagtgacaagttggaccggtttaactgcattcgaaatgagtcgagccgtcgtgctatcgtgtgctctgctcgtgtttgcagtggcttcgaccagtgccgaagatggcgatctggattccctcatcaacagtttatttatctcatcgccgggcaccgtcatcgcctcaagtacgtctgcaccacgaccaacgtctcctccaataggatctcaggctgcttgcgaacgtgggcaacgatgtgttcagaggtatctctgcaccaatgattcaactagtggagccggtttaattgatattcgcttcgatggtgacaacccttgtgtgaattacttagcagggtgctgctatgaagaagatatcatcagtgaattacctaccgtaccggttttggataatccaacttgtggaaagcgcaaccctgatgggataggattccgaattgtaggaggcaaagatgaatccgaatacggagagttcccttggatgattgcagtattaaaacaggaacaagctttagatcaggttgtaaatgtatacctgtgtggtggatcattgatacatcctagcgttgttctaacggcatcccattgtgttcaaaataagtcacctgttcagctgaaaattcgagccggagaatgggacactcaaaccaaaaatgaagtctacccgcatcaggatcgccaagtagttgagatcgtaacgcatccagattattacaaaggaggactgtacaacgatgtggccttaatattcttggactctcccctaaaactagatgatggaattcaaacagtgtgcttacctccaccgaatgcaaagtttgaccatcagcgatgttttgtgtctgggtggggaaaggacgtatttggcaaggctggaacataccaggcaattttgaaaaaggttgagctgccagtggtgcccaactctcagtgccagacttctctgagatcgactcgtctgggaccgaagttcgtgttgcacaacagctttatgtgcgccggaggggaggtaggcaaagatgcatgcaaaggtgatggagggtctccactggtgtgtcccatacaaggatctacgcagagctatcaccaaaccggcattgtatcgtggggtattggatgcggtgaagcaactcctggagtgtatgccgatgtgtcccatttccgaacctggattgatcaacaaatgcaaagccgtcatttcgatgccagcagctacacgctgtcgtaaaagctgatagtcttcgacctagttattttttgtacggtttctgtattcctatctaatgttacgctttctcaaagcattcgtttgatgacctcgtacattaagttatcaatattggtgtcatcgtcaaattaataaacataaaaaaaaaaaaacaaataaatctgtagttcct

SEQ ID NO: 200 - DNA, 1441 bp, Aedes aegypti
taccgacagttaaagttaatcgtgtgtgagctgtgaagcgtgctacctctgttctcaattaagtataataatctagcaatcaaaatgatgcttcggtattccaccgtcgctacgctggtggtgctactggccggggcggcatatgctcaagacgatctcgactctctgtttgagtcggttttcaacaatccagacaacaacaacaacaataacccagctgctgcaacgccagctccactacctcccgttgctccaccacaaccaccagcacagcgtccagctccagctccaactcaacctcaaccgcaaccaacacccgaatacacatgcaagggaacctgcgtcccatactacctgtgcaacgataatcagatcatcacagacggcactggcatcatcgatattcgcgtgggagaggactccaccgttgaaaacgaatgtgctaattatctagatacttgttgcgaaaaggaacaagttttggtggagccacctccaacttatactcaggccccgccagtgggcaacaaatactcgtgtggtatgcgtaatgccgacggtcttggattcagaattaccggcaacaagaatggtgaatcggaatatggtgaatttccctggatggttgctgttttgcgggaagataaggtcatggactcgacgttgaacgtctacgaatgcggtggttccctgattgcccccaatgtgatcctcactgccgcccattgtgttgcgaacaaacagcaggacactttgctggtacgcgctggtgaatgggacactcaaactagaaatgaactgtatcctcaccatgaccgtcgtgtgcgtgaagtgattattcatgagcgtttcaacaagggttcactgttcaacgacattgcactgttgatcttggatgaaccattcgagtttgctgaaaacgtccagccagtttgcctgccaccaaggaaccataactttgatcacagccggtgtttcgcctctggatggggtaaaaatgtttttggaaaggaaggcaaataccaggtcattctgaagaaggttgaattgccggtggttcctcaccagtcttgccaatcgtctatgcgtaccactaggctgggaatgcgatttattctggacaagagcttcatgtgtgctggaggagaagtaggacaagacacctgccgtggagacggaggatcgcctctcgtatgtccagtacctggaagtccaacccattactaccaagctggtattgtggcttggggtattggctgcggtgagaagggtatccctggagtttacgccagtgttgcagttttcagagattggatagatcagcaactatcgcagcgccacgtcgaagcaaaacattatacgtatgcttagagatttcgataaatatgttttacactactggtagagcaataaacataaacctctggaatgcagtgtaaat

SEQ ID NO: 201 - DNA, 2235 bp, Culex quinquefasciatus
atgaaggcgttccggctgggtctggtcctggccgttttatgtgccatggcacatgccaacgatgatgaaacgattctctgtccagaaggagaatgcgttaagctgcatctttgcttggatggtgaaataaacgacgatggaaccaacctgatcgatattcggttcaacccggacgatccgtgcgagcattacctcttaaagtgctgcaaggttccaaaggacgaaaacgaaggccatggcaatggcgacagcagtaccgacatagttatcccgccaccttcgggcacaggcaacgtgatcaacggtggaggtcctacctctggaaacctggtgaatggagatggacagcatgcgcaggagccgaagcttcccggtggtgatgactcccacggcagtggaagtaacgcgggatcacaaggaccgaacggtggaggtagcaacggaggggactcccatggaccgggaggttcgggaagtcacggaaccggaggtaatggacatgggcatggtggtggtggtggatacggtggtggagacaagggacacggcagtggagctaatcagggtggaaaagatcctcaaggtacgggcactggaggtcagggaactgatggtggttcgaaccaaggtactggtggaagcaaggttccttcgggtaccgaaactggtcagggatcgaacgtcggaggtcaaggaggcactggatctctgggtggacagggtggcaacactgctcccggagctggatcgaatgtaggcggacaaggcggtaccggtgctcagggtggcaacactgctcccggtgcaggatcgaatgcaggaggatctggaccggaccaaggatcgggaggaagcaaggttccttctggagctaacccaggacaaggtgttagcgggcagggtaccgaatcgagcgcgaatgcaggtgcgggaaccagccagggaggtccccaaggtaccggaacaaaccaaggagatggaggtcagggaggtcctggatatccgggatctagtgtagtggtgctggaaccaatcaaggaccaggtgttggaggttcgggaagtaccggggctaatggcgatggtaacaaaggccctggctcagctggtggaaatcagggacatggtactgacggtcagggaagcaacactggaacgggaggttctggctctcatggtccaaatgctggaccaaatcagggtcaaggaggtcagggaggttacggcaatcaaggaaccggcaaccaaggaggttccggctctcagccgggttctggtggatcttacggtggtggtgctaaggttcctggaggacactactcccagtcctgcaccggaaaagtccggctgtggtcaccgtaacgccgacggtgttggattccgcatcaccggtaacagcgacggtgagtccgagtacggtgagttcccttggatggtggcaattctgaaggaggagaaggcgctggaccaggtcatcaacgtgtatcagtgcggcggttcgctgatccatccccaggtggtgctgaccgcggcgcattgcgtccaaaacaagaaagccccggagattaagattcgacttggtgagtgggacacgcaaaccaccaacgaaatttacgaccatcaggatcgcaacgtcgtcgagatcgtctaccacaagcagttcaacaagggcagcctgtacaacgatgtggccctgctctttctggacaaaccagccgaactgatcgacaccatcaacacggtctgccttccgccccagaactacaactttgaccttaaccgttgcttcgcgtccggctggggtaaggacgtatttggcaaagatggcaagtaccaggtcatcctgaagaagatcgaactgcccgtcatgccgttcaacgactgccaatcggcgctgcggaccaccaggctgggcaagcgattcaacttgaacaagagcttcatgtgtgctggcggtgaggctggtaaggacacctgcaagggtgacggtggatcgccgctggtttgccccatccccggaacggtgaaccgcttctatcaggctggaatcgtcgcgtggggtattggttgtggtgaaacgggcattcccggagtgtacgccagtgtggcgcagttccgcgattggatcgatgagcatttgactcagcgaagcatttcgcatgattactacatttatgtgtaagactggcgttttttccgcaggaattaaggagaaataaagaagatgcgatgcaat

SEQ ID NO: 202 - DNA, 1437 bp, Culex quinquefasciatus
aaagtacgattagaacttaagccaaccgcgatgctgctgcggctaccgaccgttgccacgttggtggttgtggccctgcttgggttctcccaggctcaggacgatctggacgcgctgttcgagtcggtgttcaacaaccccgataccagctccaacctggctccagttccaacgacagccgcaccgttacctcctccgccgccatcggcgggtcaaccacaggccccgatcgctccaattccaccgcaacatgagccggtttatacttgcaacggtgagtgcgtcccgtactacttgtgcaacaacaatgaaatcatcaccgacggaacgggcatcattgacattcgcgttggtgaggacaccacccaggagaacgagtgccccaactacctggatacttgctgcgaaaagagtgacgtgctgattgagccaccaccaacggcgacccaggctccaccaccaaacaaccagtacggatgtggtcagcgtaacgccgatggtctcggcttccgcattaccggaaacaaggcaggagagtccgagtacggcgagttcccctggatggtggctgtcctgcgcgaagacaaggtcatggactcgacgttgaacgtgtacgagtgcggaggttcgctgatcgcccccaacgtcgtcctgaccgcagcccattgcgttgccaccaagcagcgcgagaccctcgttgtccgtggaggagaatgggacacccagaccaagaacgaactgtacccgcaccaggaccgtcgtgttcgcgaggtcatcgtccacgagaagctcaacaagggctcgctggccaacgatattgctctgctcattctcgaacaaccgttcgacctggccgaaaacatccagccagcctgtctgcccccgaagaacaccaagtttgacggcgccaactgctttgcctccggctggggcaagaacatcttcggcaaggagggcaagtaccaggtcatcctgaagaaggtccaactgccggtcgtcgcccacgacaagtgccaggcatcccttcgcaagacccgcctcggcaaccgtttccgtctggacccgagcttcgtgtgtgccggtggccgtgccggagaggatacttgccgtggtgatggaggttccccactggtgtgtcccatcgctggatctccgacgcactactatcaggccggtattgttgcgtggggtattggctgcggagaggataacgtgcccggagtgtacgtcaacgtgccgctgttccgcgactggatcgatcagcagctggcgacgcgcaaggtcgaggccaagcactacacgtactcgggttagagctaggagtgcatgagatttgtgaaggacatttttttttatactttaagacgatcggagaatacaaagtcagtaaacgttaaaactaaacaaccaacaaaaataaacgattttgaaaattaa

SEQ ID NO: 203 - DNA, 1428 bp, Culex quinquefasciatus
ggcggtcagtgtcattggcgtcaggacaagaagatcagaccagaaataccggttttgctggcaggctcatcgtaagcatccgaaatgaggcgtaccactgcgatatgcgtcgtgctcgtcctggcttcaggggctgtcctagccgaagatggcgacttggactccctcatcaacagcctgttcactccggaaccacctgggaaggttgagacgagttcgatggctcccgtgcctccggcaccgcccgttggatcgcagggtaactgtgagcatggtcaacggtgcgttcagaagtatctctgcaccaacgcgagcacatccggcgagggtctgatcgatattcgattcaacgatgacaacccttgcgtggactatttgctgcagtgctgttacgaggaggacattatccacgcgccaatacctccaccaacgccgactccaccaacggtcccagtcatgaacgaaccagcatgcggcaagcgcaacccggacggtattggattccgcattaccggttccaaggacagcgagtccgagtacggagagttcccgtggatgatggcagtgttgaagcaggaagccgcgctcgatcaggtcgtgaatgtgttcctctgcggtggctcgttgattcacccaagggtggtccttaccggtgctcactgcgtgcagaacaagtcaccccagcagttgaaggttcgcggaggtgaatgggacacgcaaaccaagaacgaaatccatccccatcaagaccgtaacgtggccgaggtcatcgtccatccggagtactacaagggtggcctgtacaacgatgttgccctgctcatcatggacgctcccttcaacctagatgagggcatccaaacagtctgcctacctcctcaggatgccaagttcgatcaccagcgctgcttagcttccggctggggcaaggacgtattcggcaaggccggatcctaccaggccatcctcaaaaagattgaacttccgattgtcccctcagcccagtgccaatccgccctccgctcaacccgcgttggacccaaattcgtcctacacaatagctttatctgcgccggtggcgaaaagggcaaggacacctgcaagggagatggaggttcccccctagtctgccccatccaaggctcgtaccaacactactatcaggtcggactcgtcgcctggggcatcggctgtggggagaaccaaatccctggagtgtacgccgacgtggcacacttccggaactggatcgaccagcagatgcatacgcgccaaatcgacacgaaaagttacactccgtaaccagtgatgctctcctcactttgacctcatttctaatcgtgttactatcagtcgaactctagaccatttttaagtgtgcccatttcaaaagtgtgtgttatcagaataaaataattagtttacgaa

SEQ ID NO: 204 - DNA, 3128 bp, Anopheles gambiae
tcgagccgaaccgcactgggaagcggttggggaaagtttcagtccaagctaaagtgcgtgcgttcagcacttttgttacaaatacccattcacatcgtagcgaattgcaggtggagaagattgcgcataagattcgttaagaccgtacagtttcgtaagatcgcgtttgatctcgcctcgatcacacgatgctgtggcgacaggggctactactactgctggtcggtgtgtgcctggttctggtgcgatccgaagatgaggaggttatcaaatgtactggcggtgagtgcgtgaagcttcacctttgcccgaacggcgagctgaacacggacggtgccaatatcatcgacattcgcttcaacccggacaatgagtgcgaggactatctgctcaagtgctgcccatatccggagggcgaagaggacgatgtggtgccaccgccgccatccatacctgggcccagcccagtaccggtgccggttccagggggatccgatacggttcctgttaccgtccctaacccaggccccggaggagcgggatccgttccacccggccagggaacgggccaggtgccgacaactcccagcggaccagggaacttgggcaccggtaataagcctgcgggtgccggtggtcctgccggtggattgggtggtggtagcactggtggtggttatggtaaacctcatggacagggtcagggccatggacatggacacggacagggccatggaggctgtcggggtgacagctcctgctcgtcgtctggctccgaaagcgacgagcagacggtgttggccggtgcggatctgattccaggtggtctcggaggtacttccgcgaatcaggtgaaggatcgtgaacaggtaccgcaagtgcagggtggtggtccccctgtttcggatttaggatctggtcccaccgctgggcaaccgggtaccggtaaaccgcagcaaggaggcactggcacaccagttagtggaactggagctggacagcaaggaacgggaggtatcggaggtgctggaacaggggttggaagcgttccaacacaaaagcctggtggtgctggaggagctggacccactggaactggtgcaagtggtgcatccactcaaaagcctggcggtgctggaggacttggaggtggtgtaggaagtgcaggaggcgctccaactccaaagcctggacaacaaggtgctggaggcgcaggtgctggaggtgttggaggttctggaacaggttcaggaggcgctccaactccaaagcctggacagcaaggtgcgggaggtgctggcagtcctggaacaggcactgaaggtgtgggaggtcttggatcaggtgccggaggcgttccaactccaaagcctggccaacaaggtgcgggaggtgctggcagtcctggaactggtgctggaggtgctccaaaacctggacaacaaattcctggagcaactggcggtcccggaggtagtccagcagtcggtcaacctgcacctggaggagctggtgctaccagtccagccggtaccggtcaagtgcatcctggaacacagggtggacagcctaatgtcattgggcttactgctcccggcaaagaggcgagccctacgccaggaaagcaaccggacggagctggacaacatcatgggggtccgggcggtgctaaacaccctgacactggtggtggatataaccaaggtggtggtgtgaagggtactcaaccagcagcactaatcacgcatcccattgatacagataaagtcggaaccggtacccagaacccgttggacaagacggttagcgtgccgcaaaagtgtggcctgcgcaatgtggacggtgtgggcttccgcattaccggcgacaacgacggtgaatcggagtacggtgagttcccgtggatggtggccatcctgaaggaggagaaagcgctggaccaagtgatcaacgtgtaccagtgtggcggttccctcattcacccgtcggtcgtccttacggcggctcactgcgtgcagaaccgaaagatcgaggaggtgaaggtgcgactgggcgagtgggacacgcagaccaagaatgaaatgtttgactatcaggatcgtaacgtggtggagatcgtttcgcacgccgagatctacaagggtggtctgtttaacgacgttgccctgctgttcctggacaaaccggccgatctgatggagacggtcaacacgatctgtctgccgccggcgaaccacaacttcgacatgtcgcgctgcttcgccagcggctggggcaaggatgtgttcggcaagcagggcacgtaccaggtgatactgaagaagatcgagctgcccattatgccgaacgaagagtgccagaaggcgctgcgtacgacgcgcctcggccggcggttcaagctgcactcgagcttcatctgcgccggcggtgagaagggccgcgatacgtgcaagggcgacggtgggtcgccactgatctgcccaattccgggctcggtcaaccactactaccaggccggtatggtggcgtggggcattgggtgtggcgaggatggcatccccggggtgtacgtgaacgtgccaatgttccgcggatggatcgacgatcatctgcggcagcgtaatattactgacagcttctacctctacacttagacgcgctgctcgcaaaatcccgttcctcgatcggcagcgaacgtgatcgggaatgggcttttgggatgggaaatatggatgagacaataaattaactagaataataacgcttgtcttattgtttgcgggcagttgttcgtagtcggtctagaggtctgtcttaaacctctatgggcttagggacttattcttcatgcagcaggatagtcaatccttgctaagaggggaggacgttcctttctaggcttgaacccataacaacgggaatgttattgagtcgttcgagttgacgactgtaccacgggaccacgcttaaggtctatcagtgaccctcaataagaattttagcacatagtgagctaggacttccaaaattacagaaaacagcacgcattacgaagattgtgcaccttaagaatcatttattcgctaaatcctcgcctgcatggccctacgtctaatcgaagctgatcg

SEQ ID NO: 205 - DNA, 1188 bp, Anopheles gambiae
atggtgctctggcggtacgatgtatctgctgcagttttgatgctggtgcttggttgtttggtgcacctaaccagggcggactatacgttagacgatgtgctcaaagaaatagacccagtggcacaaagccaaccctgtagcggcgagtgcgtgccgtatttcctttgcaaagaaaacggcatcattacggacggtgagggcatcatagatgttcgcgttggtgaagaaaccggagctccatgtcactatctggaagagtgctgcgagcagcgttccgtgcgtgaccagcccccacccggcgttatcaaaccatacggcatcaagcgcgagctaggtaaaccgacctgcggtgtgcgtaactcgaacgggatcggcttccgtctgtcgaccaatccgaacggcgaggccgagttcggtgagttcccgtggatggtggcggtgctgctggaaaatccaatcggtggtagcggcgacagcttcaacctttaccagggcggcggatcactgatcgcaccgaacgtggtccttaccgcagcacacatcgtgtacaacaaacagaaggacaagctgatacttcgggccggcgaatgggacacgcagacgcaggccgagctgtacaagcatcaggatcgtcgggtcgatcaggtcatcacgcacgaagcgttcaacaagggctcgctggcgaacgatatagcgctggtagtactcaccgatccgttcttgctggccgagaacattcagccgatctgtcttccaccgaggggaacttcgttcgactatcagaactgtttcgcttccggctggggcaaggatctgttcggcaaagcgggcaagtaccaggtgatactgaagaagatcgagctgccggtcgtaccgcacgcaacctgtcaagaggcactgcgcactactcggctgggcaggcggtttgcgctgcatcagagcttcatgtgcgccggtggcgtggctggacaggacacgtgccgtggtgatggaggatctccactggtgtgtccgattccgggatcgcccactcactactatcaggcgggcatcgtggcgtggggcatcggttgtggcacggacggtatccccggtgtgtacgccagtgtgtcagtcttccgtggctggatcgatgaacagctgctggaacacaacattcttgcaagggactatgtgtacacttcataa

SEQ ID NO: 206 - DNA, 1284 bp, Anopheles gambiae
atgcagcagttccgtgcggcgctggcgctgttcgcgctggtggccatcgccgtcacccgcccgaccgcggccgacgatctcagcctggacgatctgatcaactccgtgtttacgacggcggcgcccggtaagggagcgccaccgccgaccagtgcgccgcccctgccgccgacgcccgacgttggcgtgaagggtggaccgtgcggaggggaagcggtatgcatccagaagtatctctgctcgaacagcagcacctccggcgagggcctgatcgatattcgcttctccgacgacaacccgtgcgtcgactatctgctccagtgctgcttcgaggaagacattattcaacctcctccgccagtaccgccggcaccgggtccgaaccccggtcctggtccgagccccggtcccggtccggccccgattccaccgcccatgcccgaatcgcgatgcggtcgtcgtaacgtggacggcatcgggttccgcatcaccggctccaagaacagcgaggccgagtacggcgagttcccgtggatggtggcgatcctcaagacggaggaggtgctcggccagctgcgcgagaacgtctacacctgcggcggttcgctcatccaccggcaggtcgtgctgaccggcgcccactgcgtgcagaacaagcagccgtcccagctcaaggtgcgcgtcggcgagtgggacacccagacgaagaacgagatctacccgcaccaggaccgatcggtggtggagattgtcgtccatcccgactactacaagggcggcctgcacaacgatgtggccctactgttcctcaacgcgcccgtcgaaccgaacgaaagcatccagacggtatgtctgcccccgcaggacatggcgttcaatcacgagacgtgctttgccagcggctggggcaaggacgtgttcggtaaggctggcacgtaccaggtcatcctgaagaagatcgatctgccggtcgtgccgaacgatcagtgccagacggcgctgcgcaccacgcgcctcgggcccaagtttaacctgcacaagagcttcatctgtgcgggcggtgtgcccggcaaggatacgtgcaagggtgacggcggttcgccgctcgtctgtcccatcccgaactcgccccaccactactaccagacggggctggtcgcgtggggcatcggctgcggcgagaacggcatcccgggcgtgtacgccaacgtggccaagttccgcggctggatcgatcagcacatggtgcagcgcaacttcggcgcggacagctacacgccctag

SEQ ID NO: 207 - DNA, 1443 bp, Anopheles gambiae
cccggccgcggaagcagcagcagtagcgcgtggctcgtacagcgcttgagattgtagtgaaatcaatttttgtttgtgatctccgctcgctcggcccaatcggtgggccaccagtatcgcttcgattgctcgatcgaacgtgtgtgccgaaccagcgtgcggtacgaatcagcacgaccagtgacgaccacgtgcgtgcgtgcttgcgtgatgaatctagcaacactgacggcagcggtgggtttgatggtattggtggtggccctaacacccacagtagacggccagacttgtgaagggaaatgtgttccgctcaaaaactgcctccgcccgctgacagccgaaggagaggacgacgatgcaccagcaccggaagttgacttacgcatcggacaggagaattcgaacgtcgtgggcaattgctcgcactatctcgacacctgttgcgcatttgaggatgtcgttgaggagccggcagcacacagcacaacgcaggaagacgaattcgtaccgtgcggacagagaaatcaaaacggcgtcggcttccgcatcggtgctggaaaggtggaggaagcggagtttggtgaattcccctggtcgttactggtgctggagatgaaggagcttttcgactccgagctgaaggaagtgtacgcttgcgtcggctccctggtggcaccgaatgtagcgctcacggtcgcacactgtgtgattaacaaaacgtccaccagactgctggtgcgagccggtgaatgggacacacgcaccgaatcggaagtacttccctatcaggacgcccgcgtgaaggaggtgctgatacacgaccgctacaacaagcaccatcacttcgatgtggccctgctggtgctcgtccaaccgttccagccggcggaaaatgtgcaaaccatctgtctaccgccaccaggcgtgcggccacccgtcggatcggagtgtctgaccggcggctggggcaaggatcggttcggcgtgatgggtgtttaccagcacatcctgaagcgggtcgagctgccgatcgtcgactcggcccagtgtcagcaggcgctccgcaagacgcgcctcggtgccggatacaagctgcacagctcgttcctgtgcgccggcggcaagaaggatgcggacgtgtgctccggtgatggcggtggagcactggtgtgcctgatgcccggctcccaaaccaactactaccaggccggtgtggtggcgtggggcatcggctgtggcgatgaaaacattcccggcgtgtacgcggacgtcgagagctcaaggggctggatcgtgggcaagctgaatgcgctcaaggtggacccgacctactacacgccagcctgagccactgtctcccttcttaatttatctagcccattgtcgtgctgaagaagttaataaacgtacgcatttatgtattaatgcgaagaaagtccc

SEQ ID NO: 208 - DNA, 1604 bp, Anopheles gambiae
tgtaacaactcggtcgagcgtgtttcccgggcgttcgctcgagacctccctgtgtgtctgtgtgtgtgtgtgtgcgtacacctaccggatcgcgatcattccacacgcccgtgatcctcagcgcgttcgtgctcgcgtcttggagaccgctttatacatttgcccaatctctcaatcgaagttcggggatttattttcacgcctgaccgagccggtggtgtgcgaaaacattgaccgtatcgggtttcggtggtagtgtttgatttaggctgtttttttttcggagctaacagcaaacatgacccctttctccaaagcgctggtggtggcattcgcgatcgttggccttgcccaggcacagcaaccgatcgacaagatcttcttccccgagaatgacaccatcctgaactttgccaaccgggtgggcgagagcgacaacagcggcttccaggctggccagcccgatccgctggacgcgattgtaccgaccgtgcggccccagacgctgctgacggcgcagggcgaacggtgcacctgcgtgccgtactttacctgccagccgccacccgagtttgccgagcagaacaaattcaacgagattaacgtcaactacaatcccgaaagctgccaggacgtgctggacgtgtgctgccgcgatgccgactcgctggtcgtgccgatgaacaacacgcccggggagccaccggtaggaaggccacgtggctgcgggctgcgcaacattggcggtatcgatttcaccttgaccggcaactttaacaatgaggccggttttggcgagttcccgtggacggtggccatcatcaagacgcaggacggtagcagcacctgcggcggctccctcatccacccgaacctcgtgctgaccggtgcgcactgcgtgcagggcttccgcaagggccagctgaaggtgcgggccggcgagtgggacacgcaaacgaccaaggaacggctgccgtaccaggagcgggcggtgacacgcgtcaacagccatcccgactttaatccgcgcagtctcgccaacgacattgcggtgctcgagctcgactcgcccatccagccggcggaacatattaacgtggtctgcctgccgccggttaacttcgatacgcgccgcaccgactgcttcgcgagcggctggggcaaggaccagttcggcaaggcgggccggtacagtgtgatcatgaagaaggtgccgctgccgctcgtgccctcgtcgacctgcgagcggcagctgcaggcgacgcgcctcacgtcccgcttccggctgcaccagacgttcatctgcgccggcggtgagcgcggcgtggacacgtgcgaaggcgacggtggcgcaccgctcgtctgcccgatcggggcggccagcgagaatcggtacgcgcaggtcggcagtgtggcgtggggcatcgggtgccacgacgccgtgcccggtgtgtacacgaacgtgattctgttccggtcgtggatcgacaacgtggtgcggacgcttgggttcgacacgaccgtgtacgatgcgacccagtctgccttttcgagcctgtttgcttgaattcgcccatgattcggtttagtgtacggtcacactg

SEQ ID NO: 209 - DNA, 1194 bp, Anopheles gambiae
atgcggtggcaagttggtgctttcttcattctgctagttaccttcggagatcctgcgaagggccatgctattaaaggaatagagtccgacgagagttgggatatacccaactcaaacgcaaacacatctccaaacgctagctgtaccggcgagtgcgtgccgtactatctttgcaaagacaacaagatcatcaagaacggtagaggtgtgatagatattcgagttaatgctgaacctgaatgccctcactatttggaaacatgctgtaatgcacgctccgtgctagatagtcctccaccgggcgtaatcaaaccatcgggacgcaccgagcaggtccgtccgacctgtggtgtgcgcaataaaaatgggctcggttttagcgtgaccggtgtcaaggacggtgaatcacattacggtgagttcccttggatggtggccgtaatgctatcaagtccaatggacaatagcgacagtatcttgaatgtataccagtgcggtggttcagtgatcgctccgaacgttgtcctgacggcggcacactgtgtgtttaacaagccgaaaacgcagctgctgcttcgggccggcgaatgggacacacaaacagaacatgagctatacatgcatcagaaccgtcgagtggctgaggtcatcttacatgaggcgtttgacaacgaatcattggcgaacgatgtggcactgctaaccctcgccgagccgttccagctgggagaaaacgtgcagccgatctgtctgccgccgagtggaacatcgttcgactatcagcactgttttgcttccggctggggtaaggatcagtttggcaaggagggcaagtaccaggtgatactgaagaaggtcgagctgccggtcgtaccgcacgctaaatgtcaagagacaatgcgatctcaacgggttggcaattggtttgtgctggaccagagcttcctgtgtgccggtggcgtggccgggcaggatatgtgccgtggtgatggaggctctccgctggtgtgcccgattccgggatcgcccacccactactatcaggcgggcatcgtggcgtggggactcgggtgcggcgaggatgggatccccggcgtgtacggcgatgtggcgttcctgcgcgattggatcgatcagcagttggttgagaatagtattctagcacgggattactacacattccaagctcaataa

SEQ ID NO: 210 - DNA, 1281 bp, Anopheles gambiae
atgctttggtgccgtatcgggctaacgctagcttcctgtctactactggcgcatggtgagagtgaaaaggctaagccatgtgacggtggagagtgcgtgccagtgacaaagtgtaaatccggcgagcttgaagaccatggcgcatacgtcatcagtctacggttgaatcccgaggacgaatgtagctatttggaaacgtgctgcccttacccaaaggatgaggacgatgagtcgcgggatgagttgggcgaactgctaaaggcaccagcaacaggcaacggtgctggagaagcgttgaatgtggctgccgagcaagtgccgagcgtagcagcgcaaagagctaacttattgtcatccagtggggcaaacaacgtaaaatcggaaaatctcaaagcggcaacgaaccggcctccgacagcatcggcgactggtccccaaacatgcggtgtgcgcaattcgaacggtgtccagtttcgtatcaccgacgacagtgacggtgaatcggagtacggtgagttcccgtggatggcggccatacttgaggagcaaaaggcactggaccaaatcataaacacctacatgtgcggtggatcgctcatccatccgtccgtcatccttacggcggcacactgcgtacagaacattacgatcaccgcgctcaaagtgcggcttggcgagtgggacacccgcagctggaaggaaccattcccgcatcaggatcgtagggtggtggagatcgctttccatgagcaatttttcgcgccggctgcactgaacaacgtggcattgctgttcctggacaaaccggtcgaactgatggagacggtcaacacgatctgcttgcccccggcgaactacaccttcgatccggtgcgctgcgtcgcatccggctggggcaaggatgtgtttggtaacgagggcatgtttcaggcaattctgaagaaggtcgagctgcccctgatgccacggggcgcgtgtcagcgggcgttgcgtatgacacgcctcggaaggcggtttaagctgcacgagagtttcctctgcgcaggtggtgaaaaaggccgggatacgtgcaagggcgacggtgggtcgccgctcgtctgccccattcctggcgtggcaaacgggtactatcaggccagtatagtggcgtggggcattaactgtggcatagaaggtgtacccggggtgtacgtgaatgtggcactgttccgtgaatggatcgatgagcaactgaggaaacgcaatctcgctattgattactaccagtacggtcaggaatga

SEQ ID NO: 211 - DNA, 1119 bp, Aedes aegypti
gaggcaacaaaatggcacggatcatagttttcgccttattgtgcgtactccttacgggaatagttttcggagaagtgagtcaatctttcaattcggttaatatcacaactgttgaccctttgagatataatgctctacaattgttcaacaacgatcatactagcaggaaacgcctagctataagaaaatgttattcttataacttcatatacccgttgaaaattttttcaacggaggaaccttacttctgtgcggcggttttcgtcagtcaggattcccttctgacgacggctttgtgcatgaaaatgatgcagcatggcgacgagcatccatcgaaccacatgttcgccatggttgatcgtgaggaggttttcttctatgagcatggacggcgctacgtcagcaaagtgttttaccatccaaagtttgaagatgagccagcctattacaacgtggcagtcgttaagttgcggaactctgttagatacgatcgagacaccaccggacgaagccacgtggcatgtctttatcctaacaagcacatgaagaattcaaaggccatactcggcgaatggttcgagtttcaaccggaacagaatccatccttccgttggctggatttgccgttcgtcactcggaaggaatgcaacgccgagctggcaaagatgaagcgacccgttccggaattgacccgtggccttctggagtcgcaactttgtgtgcgagattcccacaatgcatccctcacacgtttctgtgatccacgttcatcggggccgctgttgatgactctgggaagcactgtctacgtggtcggtctccctacggtgcacatcgatgactgcacggtggacattgaggtgttcaatcgagtttcccaatttttggattggattgaatcggtggtgtggcccggacaggaatagggcagtgattccttcccctcattaaaattgaataaaagtttgccttccgtagaaatacgtttcgagttttttattttataagaagtatgacatcaaccgaagattaccctcatcatcgatgaatgttccaaaaatgagatcaatttatgtcatgcgtggcatttttatgttgaataaaaggaccatgaatttg

SEQ ID NO: 212 - DNA, 1161 bp, Culex quinquefasciatus
atggcagacgtgtacaagatcttgatacttttgggcgcagtggtggccggtggtgccgttctgggtgaagttggtagtcagtttagtgtccagaatgtcagcaatattgatccgggcagataccatgcgctgggactgttcaacaatgatcatccgagtaggaagcgacttgctgtgaggaagtgcacttccttcaacttcatatttccgctaaagatcttctccaccgaggagccctacttctgtccagcggttttcatcagtccagaatcactgctaacgtccgccctgtgtctacggatgctgcaacgccccgatgagcatccctctagtcacatgttcgcgatggtcgaccgcgaagaggtcttcttctacgagcatggccgtcgctacgtcagcaagatcttcgtccatcccaagttcgaggaggagccagcgtactacaacgtggccgtcgttaagctacgtaacgctgtgtacgatcgcgacgccttgggacgcagccaggtggcctgtctgtgggctgaaaaccgactgaagaacccgcaggccgtactcggcgagtggttcgagttccagcccgagcagaatccgtctttccggtggctggacctcccgctcatcacccgcaaagagtgcagcgccgagttggccaagctgaagcgacccgttccggagctcaaccagggcgttcaggacttccagctttgcgtccgcgagtcccgcaccaacagctcactgacccgattctgcgatccgcgctcctcgggaccgctgctgaccacgctcggaagcaccgtgtacgtggtcggaatgccaaccgttcacatcgacgagtgtggcgtcgaggtggaagtgttcaaccgggtgtcgcactatctcgattggatcgaaaccgtcgtctggcccggtcaggagtgaacgatgatgattgagagattaggtcccctccatttagagaaccaaaaaaatctcattgatccgaatttcaaaaaagaaatgaaaaaagcgaactacaatggcaccgatcaccctaatcatcataaaaaattcgtaaaatcagatcaatttatgtcaagcgtgtcagttttcagtgcgtttcgcatggaaaattgagtcatttttcaaaaaataaatgcgttttttttgcttctccctcgg

SEQ ID NO: 213 - DNA, 1225 bp, Anopheles gambiae
ttcgtctgaggtatattataggagattcctaaatctaaattcagttagagtgaatagtttagagtgaagcgaatcagtcgcacaagtgttaacatgaaaaaaggtgtaacatttctagcctgtttcattgtctgcctcaaagtcgcttgctctgaagcagaagttcgaaaactttttaacattagtcatgttaattcatcggattacatgcgatatcatgcattacatttgtttaataatgatcatccaaaccgactacgacctgcattaaaaaaatgtcccatgtcaaatatgctctttccggtgaagatattttctaccgaagaaccatacttttgttccgcggtgttcataagcgctgattttttgctagcaccagcgatgtgtctgaaacttatgcaaccggttgatgaccatccctcgagtcatatgtttgttttaatcgaggcggaacacgtattctattacgaaggtggtcgccggtacataaacaaaattttttatcatcctaagctagaggaagaaccagtgtaccataatctagccgttgtgaagttgcgcaatccaattcgtgaaacggtgatggcaaatggtcaaagtattgttgcttgtctatggtctgaaataaagctgcgcaataacaaagtttacttgggcgaatggtttaagtatcatcctgaacaaaatcctgcctttcgttggcttgatgttccagtcataacgaggaaggaatgtcgcgaggagctttcgaaaaataaagtaatcataccagaatttgatcgcggagtagctgaaacacaactatgtgttaaggacaagaaaaatagtaccatgattgagttttgtgaacctcgttcgtcaggaccattatttatgaccctcggtaacacagtttacgtggtagggatgcctacagttcatattgatgattgtaatgtgcaaattgaggtgtttaatcaggtttcatcatttttggattggattgaagcaatcgtatggccccattttgaacctctgtagaaagtagtgcatacaaactggttaggtttgatgtgcaacattcgtactaagttgatagtgattttgtaaatttcactaagatttcaacggttccctgtaatataaaagtatgaaattataggcattactatattatcaaatcattgattaacaaaatcgataatttaatataaaatataaaccgttaaataaaagatggttgttt

SEQ ID NO: 214 - DNA, 1431 bp, Aedes aegypti
atgcaaaacattttctcccgtgccaagcgtcaaaccagctccggcttgaccggtgatttgaagcagtttcgaaccaaggatcgagcctaccttggcttcatccagaaccttatatcggccctcaccgaatccgacgaagtctacggaaacatcaaggttaccaagcgcaaggacggcatcaccaaggtcaccttaaaggacagctccacgaactcccaagtgggattcatctaccgcaatcgggacctgtacatagtgggactcgtcgttggcaccactttctacatcgacaaagaggtgtacgatggactcggcaagaaaattccaaccacctggaagggtgtaatcaacgctgcaaacaccgtatcgctgtccaacccgttcagctataaccaaattctaccaagtggtgaaggtaccgttctgcaaatcggaaagctgggtgattcattgacacatctcaccaaaatcggtgacacatccaagcggtcgcaaatcatgacccaacatttgggtccctttgtggtggccttttccgaagcgattcgtttccccgtggtggccagagaaatacaaggagcgatccgaaaagccaccggtaccgtgagcctgtcgaaaaatctggttcggccgctaagtctcggtcatccttccgagaggacatcgaaccatgtcttcaccatgtactcactcctgttgaactggagcaaactatcggatcgggtacccgccttctacgggaatcccccgaagcagatgccgcctctggtagagggtcgctacaccgtcaatttggaaaagaatcagctgaacaccttgctgggagtggccaactcgtatcgcttccagaagtttaccatcgctccacgtggaaaaagggatgttacttcgatgttcgataactcgattcatcgcaatgtgcctttgctggagcaggatattaaatctattgattacgaggaaaatgttcaacaggcctcttcgtcacctccgatgggtatggcttcggttacccacagtccggatgttatcggcgctctgcatctgcttaccgttggaatgctgtacctctacgggaagaagatgggcgtacctatgggaagcgctcaacactatgatgatccgagggatgcgttggccgtagctgtcgatattactgatcgcattggatgtttcacgaggagcgctgggttcgagcctgacgttggctatgaagaggaagtaatgctgcaacgggcaattgctagagcattgattcgtggggaaagtttggaatccgttttgagtgcgtttctggaacagcacttctcagaggcagtacatggaagtggatcattggaaaccctgagagagcagctcattcaggcattggctgccgaaagcggatcggttcaaggtgatggaatcgccggagaagaatgtttcaattaa

SEQ ID NO: 215 - DNA, 1450 bp, Culex quinquefasciatus
atgcagttcaaccgcgccaaacgtgccaccaccaccgtgcgaacgggcaacatcgacgacttcaagaagaacggccaaaactacctgacgttcatcgacagtctgcgcggtgacctgagccaaccgaacgtggctcacggcggaatccgcgtaacgaaaaccgacaacggcatcaccaaggtcatcctgaagagtggcaccacccagattccgttcatctaccggaacagcgacctgtacattgttgggttcgtggttgggtcggtgttctacgcggacaatgacgtcttcaagtggatttctccgcgggaaacggtcggcaagttgccggccaagcacgcctggaggtcggtgctgggggatgtcacggtggatacgctgtcggttccgctgagttacaataacatcctgcaggggcgcagtaaggttccgatcaacaagatgggagattcgctgaagaagctgaccgaggtgggagatcggaacaagaagagtgcgatcgtcaaggaacatctggtaccgtttgtggtggcgttttccgaggcgatccgcttcacggtggtcgctagggccgtgagggatgccttcgtgaagaatggaggggagttggacatgaagacgaacgtgctgaagttggctggggctggaggaccggatcagcgcaagagcacccgctatgacatcacctggttgacgctgaactggggcagtctgtcggagaaggtcaaagtgtgctacctggacaagcaggcaccgactccgttcaagtactgtgacgaaccgctgggactggagaagaaccagctgaatcagctgcttggagtggccacggccaggtcgttcccggcttctcgtggaaagcgcgaggttcagtggttcaaacaaccagttcagcaggtggttgatcccgtcggtcgcatcggcgccgaaggcgatcttcaagaagcgtcttcttcaaagccgatgtctgcgatcacgcaccacctggacatggtcggatcgcttcatctaattaccatgggaattctatacctttccggtcgcaagcttcaagcctttgagcacgaacgtgaagttgacggtcaggaagcgcaggcgatcgccgccgacctggtggagaagatcaactgcgtcacgggactagactcggactatgaagaagacatgagaatgcaacgggaactgtacggagcgatcgttcgaggagccgatgtggtgcagatcatgaccggacttgttgagcagaggattgagaagagaaaggtcgttgaggaagcggtgaagtcgatcagctttgagcttgcgaagcggaatcatcttgagattcctcaagaggcggaacttttcgcaaagaattgcttctaatatttcccagtaacattctacttgaatactgttttttttttaaatgatttgactaaataagaataatccttttagttttcaagta

SEQ ID NO: 216 - DNA, 924 bp, Aedes aegypti
tctcagagttcagaatctagagtgcagagtctagagatcacggtccgaagtcgagcgtccagagtccagagtccagagcatatccaaagtccagaatccagcgtccagagtccagagtccagagtccagagcatagtttcaagtgtccatagtccagagtccagagtccagagtctagagtccagagtccagagtccagagtccagagtccagagtacaaagtccagtgcccagagtccagagtccagcactcagacgtccagagtccagagtccaaagtcaagagcccagcgccctgagtccagagtcaagaatctagaggccagaggtccgaagtcgagcatccagagttcagagtccagagtccagagttcattgcccaaagtccagagtccagagtccagctctcagacaaattctagcgatcagggtccaaagtcgagcgcccagagtccccgatctagagtccagagtccaaagtccagagtccagtgcccagagtccagagttaagagtccagagtccagctctctgaaacccagaatgcagagtcagagatctggtccgaagtcgagcgtccagagtccagagtcaaagcccagagtccagctctcagattacagaatacagagtgcagagtctagagatcagggtccgaaattgagcgtacagagtccaaagcccagagctcagaattcagagtctagagatcagggcccgaagtcgagcgtccagagtccagagtcaagagtccaaaggccagagtccagctctcagagttcaaaatccagagtgcagagtctagagtccagagttcagagtacaaagtccagagtccagtacccagagtccagagcccagagtatagctctcaaagttcaggatccagtgcagagtctagagatcagggcccgaaatcgaacg

SEQ ID NO: 217 - DNA, 861 bp, Aedes aegypti
tccaagacacaaagccctaagcccgaatcccaaataccaaattccaaagctcaaagctcaatgccaaaagctcagaccacaaataccaaagcccaaatcctaaagctcaaagcacaaagctcgaagcacaaagtccaaagcccgaagcccaaaacacaaagcccaaagcccagagcctatagcacacaaggcccaaagccaaaagcacaaataccaaagcctaaagcccaaaacctaaagctcaaagcccaaagatcaatgcccaacactcaaagcccaaagctcaaactcaaaacacatagcctaaagcccagagcccagtgctcaaggcccaaagcccaaattcaaaatcccaatgccaaaatcctaaagctaaaagctcaaaacccaaagcccaaagctcaaagcccaaagcataaagctcaaagcttaaagctcaaagcccaaagcataaggctcaaagcccaaagcccaagacccaaatctaaaatttcaaatccaaaagcccaaattcaaaagcccacagcccaaagcctaaagctcaactcccatagttcaaagcccaaaccaaaagctcaaagcccaaggcacaaagtccaaagcccaaagcccaaatccaaaagcccaaaatcccttagcccaaagctcaaagcccaaagcccaaagctcaaacctcaaaacacaaagtccatagcccaaatccaaaatcccaaatctaaaagcccaaatccaaaagcccacagccctaagcctaaagctcaaagcacaaagctcaaagccaaaagcgcaaagcctaaataccaaagccaaaagccaaaagctcaaagcctaatgctccaaacacaaagttcaaaatcaaag

SEQ ID NO: 218 - DNA, 1259 bp, Aedes aegypti
atggatgacggcaatggtgaaaacgctccagcaaagagaacccgatttgccctccgggaaccactaaaactcggcgacggagaacttcccggtcccgtggtggaagttttgacgccacatcagctggaaggaatccggttcatccatcggggtgttaaacagaacaaaggtgtaatcttgaatgacgaatccggattgggaaagacgcatcagatagttggttacttatcggcaacggttggccttgctgctgataagactgcgatcttgtgtgatagtgcagagcgggtgcatcattggctgtaccatttggagttgcttaccgagttcagaacattgattctgggagaggaaggtgaaagtgatcaactatcagggaaccaacagataattttggctactttcgattgcttccagaagaattcccatgcccttcttgctagggaaaaagacattaacctattggtgatcgacgaaaccaaagaagtgcagtgtgagattggatttctttcactgatcgccgaattccagcgcgcggccagaatatttttggtaaccgaaaaccttctggacaacccggtccgattttctctgaggctcaaactttgtcaagtgcaatttcatgtggatgcgttgaaaaccttgctggaagaagcaatccaaactaatcgaccgttgaaaaaagcgaagaagttgaaactattcttcctgacccggagcgtttggttcagaaggtatcgatctcatcacaacagctacctccccctaatagacgagcacgagttcaagttttgcttcaacgcttggaagatcgccaacggaatggaatgtagacaaattgaagagaacagtttgcaggttctcgaggaatcgagtcaagaactggttgaaaatgagacagccggggaaacgagcctcaatatggccatcgtgggggataaggaaacttcaggcatcggaagggacttatcgaatgagacagatgatgacaaagacgaagcggtgaccgtttcgtataaagttagcgagccgttgttcgatttcgagctgagtacggaggaaatgcccaaattggtggtggaaacgtctgattcggagactaaatctactattgatgatgttaggaagtctcccttggttaaagcgtcaggtaatttcatttaaatagtttgaaaatagcataagttgaggtttcctacgaaagggtgaaagcacaaaaggctagggtatcaaaaagctgaaaatattgatgtccttct

SEQ ID NO: 219 - DNA, 1287 bp, Aedes aegypti
atgctgccatttgagaagacgttccgaaactccgacacaaactcattgaaaatatgcgaaacactctgcctcaatgacaaggagtgccaaacattcgctttcggcatttccggacgaggtaatggaacatgccagttatcggcaaacgttatcgatgccaccaattcccgccctgtcggaaccattttcgatcccgacttcgatctctacgcacgaaagtacaactgttttttagacacgggtgggccttcgaatcctccgccacgaccaggcctgggcactttcccggcgagtgaactgccacctggtggaacgcaacggcccacatcatcatttcctccttcgtctggagcaccagaacgacctgggccaccagttttcacccctactggaactacagcgacaggagaaccaatatcatctaccagtaatggaggtggattttccgaaacacgacccactagtgaatatccagggaccttttcaaccagcgttggaaccacttttgggcaatccacgggcgaaacagttcaggaaaccactgctcccgatgaagaatattacaccacacaccaacagccttcatcaaccctaacaggccattacacacccaccaccagtaccgcttccggttctccgataacaaccggtgcagaccggataccttcaaagcaacctccaccaacaatgcctgcagaatcacccacgaagtaccctctagatctcagaccttcctatccaggatcatcccctgcccgaccagtgagctatcccaactaccagtttccaatgctctacgaaacgaactatccaatgcccaataacaacgaacggcagccggatatctacgcccaaaacataccgtccctggacaacaactacctacggccggaatatgccggatactttggccatcgtccttcgggaccgtcggccccaacgggaaacatgaaaccggtagataacaccttatcaagttacggcggcactggacctcaacgaccgatagaaaacaaaccctccagctacgggggaggtcctctacggccatccggatccggatcaggacccagttcttcgggatacgtgacacgacctcccccagtgggcccgtccggatcagacgggtacaaagtaacggaggacaagcctgacctacattcgagcaaatatcgacctacctctcctgcgcttcaacggtcatcgggatctgaaccctcgtcgatgcacaacatcgatgtacattacttatgcggggattcaatggagagcatgtgtgtgcactga

SEQ ID NO: 220 - DNA, 789 bp, Aedes aegypti
accacaacccgcaccgtcaagtcgactgcctcttcgtcgagcaacgccccgaaaccgagcatcgagaacctagagcagatctgggacgaagccgtactaaagcaattgttggaatcgtccactaactacgaggaacgccgcaagatacgagcccgtctacgacagatcatggccgaaaaagaagcggcgcaacgaggtcaacccccccaaagtagacttccaacgactccaggaggactaaccgtcaaattcttcgccacagtgacaaccaaaacggttggcccagcgaaacccatgtccgcgatggcgaaattccgacagcttgacaagcagaactccatcacatcacaatcaccccctaattcccctagaacgccgtcaaccccatcgacgccgggtggtaccggtaccgggcccatgtttcagttcactgatccgtcactgaaccgccgcgcagccactgtcaaggaccaactgttgcagtggtgccagatgaagacaaggggatacgagaacgttaaaatagaaaacttctccaccagctggtcagatggaatggcattttgtgcgctgattcaccatttccttccagacgcttttgattttaccaaattaacaccgcaacaacgacgtcataatttcacactcgccttccgagtggctgacgaaaaagccgggattgcgccactgttggatgttgaagatatggttgtaatgcgaaagcctgattggaaatgtgttttcacatacgtacaatcgatttaccgacgtttcaaaaatgaggattga

SEQ ID NO: 221 - DNA, 975 bp, Aedes aegypti
tctgctccaccattcccaaattatatcgagcaaacgaagtcgagtccttcgaaccataaatctccaatcatcatcaaaagtccagagtttagagatcagagtccagggtgttcagtgtccacagttcagagttcagattccagggtccagaaaccagagaccagagtccagagtccagataccagagaccagaaaccattcagagaccagagtccagaatccagatctagagttcggagtcaaaaactagagttcagagtcctgagtccagaatccagagcccagagttcagattctagattccacagtccagagtccagagtccagagaccagagtccagataccagagtccaaagtccagagttcataatgcacagttcagatcccggagatcagagcccagagtcaagaaatccagtttccagagtccagtgtctagagtccagagtccaaaattcagagtctatagcccaaaatctagagttcagagtccagaaaggtccagagaccagagcccagagttcagattccagattccagattccagagaccagagtccagattctagagtccagagacaagaacccagataccagagtcaagagtccagagttcagagtgcacagttcagagtccggagatcagagcaagagtcaaagtcaagagtctataatccaaagtctagagtccagagcccagagtctagattacagattccagtttccatagtccagagtccagagtccagagtccagagtccagagtccaatgcccagaatccagtgtccagagttaaaagtccacatatcagagtccagggtatagagaccaaagaccagagtcccgagtccagagttaagaatccaaaatccagaagttcaaaaccagattacagagtccatagtccagagtccagaatccagactacagagttcagagtccaagcttcaaattcaaaaaaaaaactagattag

SEQ ID NO: 222 - DNA, 2063 bp, Aedes aegypti
ccggaggaggaccggacaagagcagaagctaatgattgaggagagcccgcgcaacgcaaagaagtggattgttgtatataaacaagtgatttttggcagcgcggttgcattccattattgtcgttcgcgcgtggaaaaacggtgctttggtggaaaccgaaaacagcaaaagtggaagagatttggttttggctgtttgattttggagacgcatcgatacagtgtaccgataattacggaaaacgataccatccaaagcggtgcatggtgtgctgaaggactcagaacataactgcgcaggcctagaaggctgactgattggtgactggttgcggaattagaagattatttgacgagtgtgctctttcgattggtgcacgattctcgaagacggggaaatacaatgatgtatttcaagttaacagccattgtgctgttttcagccggtgttctagccggcaaagaagcgcagcctaaatcagctgctgctccagcttcatcgccttcgaagccccaaccaaaaattcctcatggaaaacgtgaagcacccgttggatacggacccatggactacctcaatcccggtcatacaggatacaactatggagtagcgcaaccatcattcaaccttccacagtactctggccaaaagtacttcatgggaccatttaaatacccaacaacacaaccggcttactttgctccggcaagtcatggatacaacaccttcgcggataattcggtgaaatacagcattggatcgaaggaactatcagatttactcaaagctctgcattctccaagccctgcgatatcgatcaaagctgtccccactggccagggttgggatacaccttacagttacgagtcactcaaccaattcaaaccgacaatgatcaagatccatgaagtgccgtctcatagctatggagcccctctagctccgacaacgaactcttactattctcatggctatagtgctcctcatccagcagaacccacgtatgcttctggagtcaaaggattacgtcactatgcctcatcatacaacgcagcgatccctgatctatactctggaaacaaatacatctcatccatcaaaccactagccgttcagactcccgttcaagtgttgtctcctctacatacctctatccacacgcagaaaccatttaagccttcaacatacctaggaactaccaatgatgcaccagactactcccacacacaatcccccacctcaacctcggttcacaacagctatctagcacccagtctccaatatctaccaccaaaggctcagaacaagataacatttgaacaaccctccaaaacctatcttccagcgctcccatccagccccagtaacacttacctcccaccgaagccttccaatacgtaccttccggccaaacccagcagtggaaactacatcccgatgacctcccatggggacgactcgaagcatctgcagcacttgcatcatcaccacagttcggatgagtctaacgattcgtacgagtacagcggaacggcgggatcagctcccagcggaagcaccgtcaagccccatcaccatccgtggcaaccatgaaacgcttcctaaccgggttcgctgaggatcatccaaagactttcgattccttattattacatttattttcttctttcacccgaatgccaagtgaaagagcagcatttatagtaaggttccataacagtactggataagctatttataaatgtaagacgaatgggtcccgtatgctggtggaacggagcaaagaaccacggccatgcgaacagatgttggactattgccatttatacttttttttgtaatcgtccttagataagaataacattcgaatgaaaacttcaaagagagctctaggcgtctaacagaattatgtacgtatgaataattctagtgataggtctagtggacttgaatcgaaaactctcttctgatgtacggaacgactaattacactaatggtgatttataatatttatgtacattaaaccaactcgaatcataaaataaagatttgatatgagaa

SEQ ID NO: 223 - DNA, 1022 bp, Aedes aegypti
agtatcatttgttcctcctatccgacaaccgaaaaatacatccctcaatatgaaactattatttctactctgcctgatttcggccggtgcactggttctggccaaacctctcgtaacttttgatgtggttcaaccaaccgatgattcagatgtcattggcgatgtagtagcttctgattccgatttgaataaaccagcggaagaggacgcggaagttgatggtgcactcgaggaatcggatgcgcagagcgatgacgaagatcaagtcccagaggacgagaatcccaatggaaaccaggaagcagatgaccacgagaacgatgcagatcaaactctggaagattctaatgaagatagtggcgaggattcggtagacgaactcgaagatcatccacaagatgactcagaggaatcacacggtcaaaattctgaagaagttgatcaatcatcacaagacgatggagaaaccgaagatcacgacgatcatgaacaacgtcctccacaacaccctggacaagatgatcatggaccacatcctcctcaaaaaccacagaaccccggacaagatcatcatggacaaggtcctcatcatgaaccacaaaagccaggacaagatcatcatcatcatcatcatcaccctcaagatcctcagggacctccaaagccaggacaaggagctcatggacaacatcctcatcatggaccacaaaagccaggacatgatcatcatggacaacatcctgctcatagaccacaaaagccagagcaaggaccccatggagaacatcctcatcatggaccacagaagccaggacatgatcatcatggacaatgtcctcctcaggaacagcaaagccccggacataataatgaacaagaacatggggctccacaagaagttggatcagttccacaagttgtaaacattagtatcaatattggtcaatagagactggtaagaaaagaacgggaatacagtcgacttctctaacgatgcaataaaataattctgtaaaaatgaa

SEQ ID NO: 224 - DNA, 939 bp, Aedes aegypti
aggaagacctcagaattcagaagtaagacgtcgaaagtcagaagtcggaagttagaagtcagaagtaagacatcagaattcagaagtcagaagtcgaaagtcagaagtcagaagtcagaatcagaagtcagaagtcagaaggcagaagtaagaagtcagaagtcagaagtcagaagtcagaagtcagaagtcagaagtcagacgtcagacgtcagacgtcagacgtcagaagtcggaagtcggaagtcagaagtcagaagtcagacgtcagaaatcaaaagtcagaagtcagactcagaaaacagaagtcagaagacagaagtcagaagacagaagtcagaagtcagacgtcagaagtcagaagtcagaagtcagaagtcagaagtcagaagtcagaagtcagaagtcagaagtcaggaatcagaagtcagaaatcaaaaatcggaactcagaagtcagaagtcaaaatcagaagacagatgtcataactcagaggtcaatattcagaagtctgaagtcagaagtcagaagtcagaagtcagaagtcagaagtcagaagtcagaatcagaagtgagacgtcagaagtcagaaatcagaaatcagatgtcagaagtcagaagtcagaaggcagaagtcggaagtcagaagtcagaagtcagaagtcagaagtcagaagtcagaaattagaagccagaagtcagaagtcagaaattagaagtcagaaatcagaagtcagaagtcagaggtcagaaagcagaaatcagaagtcagaaatcagaagtcagaagtcagaaaaagcagaaagcataaagcataaaaaagaaaggagaaagaagaaagcagaaagcacaacgcagaaagcagagaggagaaatgatgaagcagaaaacagaaagttaaaagcatttagaagaaaacataatacaagcagaaagtag

SEQ ID NO: 225 - DNA, 1455 bp, Aedes aegypti
atgatcccccatcattccgttaatcgcaagaactactcgaaagttaagaggatttggcaaaaatctaccagcacagctacgaactcgaatctcaaaagcaaacaaaatagcaatccgatcaccttctcatcagggcaattgattgttcccacatttaacaagcaacatgaagcaaaccgctgtcttttcccggtggagccattgaaatccgaaaagactcgagttcaaacgcccaacattgaagtgccagaaactgagcgttcgtctcaagcaacagatgaccaaacggattcggaaggatacctgcagtttggccaggcgctgttccaacctagttctcagatagaaagctcttcggaaacattagttcgcaagtcggtcatcgcctccagtgatgacaagtacaacttcccaatcgatcgattcttccaacggaaatcgccttcttcatgttccaccgatctcgaaatcgtatcgaaggaaagtgtcatcgccaacaaccccatattggtgtccagttccagctccaactgtcgggaaaagtcccccgatttgttcagcgactccgaagacgaaactgtcaaagcgatctctcaggatgattcccttctgaatcttctgctcaaaagccccgttgacttggagaaaacgtccaaaccgaacgcgccaatgcagcaacccctgccaaagtttctccgaatcaatgtgagcacccctatttccaaactccttcacggtcctctacaaaacgaaatcccgtgcgccgccacggaacgtccgtcctccaacgatatcttcgctgatctcaccgtcaaaaatcccgatcccaatcggacggacgtttttgaaatcaccgacaataacgccttcggaaaccagattctagtccatgccgaaaaggacagcatgtcccctttgcgcgattccgacgacgtccagttcgttagcatccttcggccaccggacgaaatcgtcgacctggataccaacgcttgcacgccaaagagtcaaaatggacccgcccccaatcctttgaaacgaacaccttcctccaagggaacgcttcccgccacgccacgcggttggctcaccaccaaaagcaaccgttcctcggatagtgactcgccgcgaactcccaaaacttccataaagaagtcaaccccgcggacgggtagacgttcggccggaaccaacagcacgttgtcgagcttcaagcgcaagaagctggagaattggttccgcgatgctccgaccgatgacgatgatgattttgaggattgccgccgcgtgtccacgagtgtgaaccggaggaaatcggctcccgtcggtggtggaccgagtggaagtggtggtaagaaggtttccccgcggaagaaatgcttccaggagcgggtcatacagcgctacaatcaaatattggtatcgcctagcggaatggatagtgattttgagtga

SEQ ID NO: 226 - DNA, 2830 bp, Aedes aegypti
ggcgaccgatccaaaaccacacaatgtttggtgaaaagtgtataaaagtactaggccctggtgaaattgcaaacagtagtcagtgcaatttccttccaaacacatttcctcgtaggcgagcggcgtcggcgtagaaaggcgaaaggcgataaccatcgcttagtttcgacttcaacagcaacattaacagtagtaacggcagaaggagcaaccgaagaacttttccttctcgacagaaacggtgaatagtgttgaccaatcaaatggactgtgaatagagtgctctcgcagaggaaccttgaaagtgtgaacggtcgacgaaaatgtggaaaattctctatctattcgcgctcgtatcaacacattacctggaaacaaaagcgacaggatcgtacattgataatgtcatcgaagagcagcatagggtcatcaatgagatgaaccaaaattttacagatttggaaaaagctagtgaaaaacttatcaatttgggtacgttcgttggaagtcacaaggtgccacctaaaaccgtcaaaattaccaatactgttgcggtgaaggttcccgtgccataccccgtgaaaatcccacatcctgtgcctgtaccagttccagttaccaaaactgtccccgttccggtaacgaaactcattaaagttcccgaaccatccccttcaccaacaccaactgcttcaagttatgccaccacaccagagataattcctacagctgtggctctgacaagcagatcgctggattcaactggggcatcacagctgctctcaggagaacaagaaacggcccattcaagcactaatgaacaggttgaagaattcgtacgatcttttccagtgcattcggtttacgatgttggatcggactacaatccatacatgggaaatcgattagcaataaccaaacaagttggatcggcatcggaagtgcatcccacaaagcaccgtgagtcggatctccagcaattgcacgaataccgaggtccacggcagaaatacgaatcaggcaagcatcattatccagattatcgatcatcagccaagcagcaagcgactgcaagtccttctcatgcatatcatgaatatgcttattctggaggaaactctgagacagctagtcacaagtttcatcccgaagttatcccaaattcctataattctcctacaaaatcatcttattactcaaaagattatgataagtaccccacccctaagtttccccgaccaacaagttcttcataccccactagtcccacattcagtactcaagaagctacgtatggcgatgaagagcaacattacgatggtcatgactataaatcacgtcaacaaaaaccatcacccacttcagtagcttatcaaaccgttagagaatcttatcctcgttacgaaaagccaaatttacagcactatcaataccaaaaacctacagctgaaagctatcacaacaactacgaaagggaaaccgcaagtgcgagtcatcctcagaaatctcaaaagtatgcagaacactatcaaaaacccacagctatgagctacactactaaacattacaatggagagcatagagaaatagctgagccttctgcacattacaagcaatacgaacaccatagcgaatcttatctgacacgcgatgaatcttatcctgagcataaagctccatccgaacactacgactctcatgactcttatcctaaacctagtgccactccagagacgtattcacaatacgagtccaaagaaccagaatacgtccctcaagaatataagacatactacgccaaaccaactccggtttccgaagccctcacatacctcgaagagaaagaaccttcacgcgacacagagcacgttgttcatgtaaagccacaaaactatcactacgaaaccctccaagaccataagactcaatattcttcaaaatcaaacagcatcccttacaatttcccaagcgactcccatttgcacccatcctattctgaatcgacacacagcaagcacaaaccccagcactactattcttcctcgcgtggacatgatgaagaaccgaaatccgaacaccagtactatcaccacgcccagcaccacagtccaagtccttccccatcgagtcacataacttcctatgatcatgccacggccagcggaaacgaataccaccatcatcgtcagtatgcaagaccaccacagcaccatcattatgagtcggcacatgaaagtggctcagatatgctcgaatcgtcctcatcgaaagatcacgaagcctacgagcgggcagttgagcaagatcatcgagcagcacaccccaacgaatacgctgaatatagccacgagcacctgcaccatcatcatcctgccgagcgggaggagggcggaagggattattaaagcttgttgtacaaccatcagatcagttcccgagcgctcaacggccacgacggatacacgtgacggcgatcgactgataatgtaaaaaccacgtgtaatttactatttatttcaccagctgcctacacccgtcgagcattgtccgcacctatagagcattgtctcgcgcttcttcacctgtgtgatagtgaagaaaatagccggaatacgtttatctaataaaattcgattataacatcccctaatttcccggttctctttccgcgagtatacggatgcatggccgggatgatctacaagctgtgcacccactcgaaatgttgactagttggtaagattcgtgcaaattgtattcgagatttgcaagtataaattctgttaacgaattggagcaataaagtaataatttatctagtgttaggtgg

SEQ ID NO: 227 - DNA, 958 bp, Aedes aegypti
atgaaactattatttctactctgcctggtttcggccggtacactggttctggccaaacctctcgtaactttcgatgtggttcaaccagccgatgattcagaagtcattggcgatgtagtagcttctgattccgatttgagtaaagcagcggaagaggacgcggaagttgatggtgcacacgaggaatcggatgcgcagagcgatgacgaagatcaagtcccagaagacgagaatcccaatggaaaccaagaagcagatgaccacgagaacgatgcagatcaaactctggaagattctaatgaagatagtggcgaggattcggaagacgaactcgaagctcatccacaagatgactcagaggaatcacacggtcaaaattctgaagaagttgatcaatcatcacaagacgatggagaaaccgaagatcacgacgatcatgaacaacgtcctccacaacaccctggacaagatgatcatggaccacatcctcctcaaaaaccacagaaccccggacaagatcatcatggacaaggtcctcatcatgaaccacaaaagccaggacaagatcatcatcatcatcatcatcaccctcaagatcctcagggaccaccaaagccaggacaaggacctcatggacaacatcctcatcatggaccacaaaagccaggacaagataatcatggacaacaccctgctcatggaccacaaaagccagggcaaggaccccatggagaacttcctcatcatggaccacagaagccaggacatgatcatcaggaacagcagagccccggacataataatgaacaagaacatggggctccacaagaagttggatcagttccacaagttgtaaacattagtatcaatattggtcaatagagactggtaagaaaagaacagaaatacggtcgaacttctctaacgatgcaataaaataattctgtaaaaaatgaat

SEQ ID NO: 228 - DNA, 705 bp, Aedes aegypti
ataatcatggattggaagttgctgttgattttcggttgtgcgattgtagcttgcagcagtagtgagaagccacgtgcaaactccaaacattccgaagaatctgaagaagtgtatgaagatgaacaaagttctaaaaagaacgagaaggatcgaaaaggctacaagtcgaaacatggacttcgcaagggcagtaaaggcagttacgacaaagaagatcactcgcattcatatgccaaagaaggcgatcggaagaagtcctatcacgacgaagatggatacgagaagaagcatcacgatgaaggccacaaggtaagcggaggaaaacatggagagaagaagtttcacaagaaaggatccaagactaccggttaccacaatgtgtatcacaaagacgagttcaagaaagagcacattttctacgacacctcggatcacagcgggaatttcaagaagtacgggtcatctcacaaggaacactccaacgacgaagccgagtttgccaaagggggccacaaagaggaggcgcattccaagaagaagagctctaagaaagggcactcggaggacgggaaatacgatagtaagcatcacgagtacaagaagcagcaaggcgataccgaggagtaccgggacagggaggagtaccagaacaagaatggaaagctgggttcgatggctcatggatataagatttatcatcattga

SEQ ID NO: 229 - DNA, 6885 bp, Aedes aegypti
atgacgggggaggtccaaatacctcggttgatatctcagcagtggatagtgggtcaatttccagcccccaacatcgaagacgtcacaaagaattttcatgaatccccaaggccgtggcacgacgcacaggacttcggccgcaaacgggagatccgtgcgcatatgtacaaactgcgcgaggagcgcctgaaagccctatacgcccccggagacgccccatcgatagctccgtcctcgccgtacatcatggagcagcacaacaccagcagtgccaagttcggactgtccaagacgtccgtcaccggaagtcacggcgattcgctcgccgaccagagcttcgaaagcttcaaaaccaaggaaatcagagactcggaaagccccactcgattcggaaccgtcatcccttcagacaacagcggctggcacgttacatcgtctgaagagcgcagtgctgacggtaagacccacacccttcgaagttcagccactaccgaaggaacgaaggacatccaaggcggacgcacctcgttcaccggcaaaaacgaagaagttagcagcgagcgcttcgaaggcgacgacaagaactttgtccgcagctccggagatcaatcggccaccttcctggcggagaatactgtcctcgaaggagaagacggcagcacaatctccaagaaatccacatcaacgtcttcctcttcgacgaaagtggtccgctcgcagcagaccttcggcgacaccatcgaattacctcccgccaataccaatattccggagtttatgtgcggacacacggccagtacccgagaggaatccacaaaaaccactactcaaacgcaggaaactgatggcaacgtaaccagcaaacacctatcaagcgatccagaccgtgtcagtgaagctttccgcttggcagagcttcccggcaaggtcatcgaacgagacgtccgaatgatcaacccctccactaggatgatcaccatcaccaaaaagctcgaagatggaacaactgtcactactcgaaactacgaaaaggtcggcgtggaaccggagaaaccctttgaccagcaagcacatgcggaaactcagaaacggctcaacgcagccgtcgaagccctgaacagcaagagtcgagacgagatcgagcaccgatcggtcaagaaagacatcaccgagaaggttaccaacttgcagttcatcgcagaggaacgttcggaaactgagcgagtcgagcaggtcaagaaacaacagcaagaagccgtcactcagcagaaggtcacgatcgaggtcgatccagcgcacgattccttcgcccgttcacttcgttgcgtttcgcctaccgagagcacacgctcggttcgctcgaactcaaccacagggcgatccagcgtcagcccggacaaatccacccgtggaagacgctctccgtcgcgggaatccgatactagtcgcctcagcacccacacaactactcgttccagtcgtacggatgtgtcctccaaggactacatgaaaccgaccatcacatctgagcgaaaacagtcaaccttcaaggaaaccgtcatccaggaatcttcaacttcggaagcatacgatacggttgacaagaccaagctcagggaacactcgcttagtccgaggaaagttccgcaaaactctccggatatgactccacgtggccaatccccggacaaattcgcccggaacgtctcgcctagcaagactccgaaagaatcagttccgttctgttcggttgatacaactcccgtcaaacgcgagtcttctccggtgaaactaacctcggaaaagttgattcgtgagaactcgtccgagtcgttcaacgtcgacacgacgatcaccatttctaccacggaagacaagcaaaagcaacatcaaatgcgagaggatgttgaactgatcgacacgaagaagattgtcagcgagaatgacgatattacgatcaacgtcaagctagagaatgttaccgatgacatcgaagtaacgactacagtcgaggaagttggattggatgaaaagaagtctacagaagaccaagaaacaaccaagtcaacgaagactccgaagcaaaagccaccactagtgcgaagcgaaactttcgaagaacgatgccgtaggattttgggaatgcccgaaaaggctgacagtattgaggagactaccgaggaaacgaacacgtccagcgtgttcagcacctacgacaatacggtaacccgcagctcggagatccgcgagaagcgcaaaaagctagagcaagaaatcaaaaccatcgaaagcgaaacgatgagagctgctcggaagacgaatgagttccttgcaggcgaacgacgcccatcagcaccggcgagttcccccgatcgcaaggcaggcactgcttcgccaacgaagtctacatctccagttcgtaagcactcccaaccttcgccggagcgccgacctcagccatcgaaggactcctcaccgatcaggaagcactcgcagccttcgccggagagacgtcctaaggaggaagcccccgccaagaaacctaccgaaattaaggaacaatcacccatcaggaagcattctcaaccttctcctgatcgtcgtccaaaggacgaacaatcacctcaacggaaaccggtggaaccaaaggacgcctctccagtgcgaaaacattcgcagccatctcccgtttgtaagccttccgagcaggtcaaagaaccctctccgcaccgttgttcgcgatcacacgatcgttcaccgagtcccaagatggaaaagtctcccgttcaaaaggttgccccgactcaaatcgattccactgttgtaaccaaaaccacaacttcgaaggccgaaattctcatcaaccagaagaaggaaggtaagaacacttcggttacggaaatcacgatccaaccggtgatcgacgccaagaagtccgacaaagttctcaccaagcagacatcggacaccaaattcgaccggcgctcaaccagcagccgtgtagtgaccaacaagagttcgtccgacttcgacgtgaaacgcaaggcgtacattgccgaaaagacggaatcggagaggcctgcccgtacgacgactaccaaggttagaactccagcgaccagtccagaaaagcgccgtccattggacaccagtccaaccaagacggataagaccaagcatcacataacggtggccaagatcaaaatcgagccagttcgtaagcctttgctggccaaggttgtcgttgaagaccgatcctccaaggtcggaaggacctcgaaaactacgaagaaggtcgttgatgagtacacggaaccggaatccgacaaggacaccggcatctcggacaatgagatcgaggatgaaacgacgacagtggaaacgaccactactacaataaccactaccaagaaatctgatcgtaaggactcagccccggtgagccgaatatccggaagggtagagaagtcatacgctcgttcgtcaagcgataatgtcctgaaatcaaacaacgtcacgaagaagacaaccgcagcgaagagcgcaacggcaactaccacaacaaccactgcttcaacgacgaagaagattgagcgcccggtgaagtgtgttacaaccaagaccatcaacctgtcagccaaaccaacgatcgattcggacattctggacaacgtagtcatcgacatccagcacgccaagtcatcgcgcgagcctactccgaacaagctgattccgattccggtttcaccagacgaggataccggcaagcctcgctatccagatgcggtacaggaaccggacgatgaacccaagcacgccccgaaggtgagcaatgtcccaatattcgaggaagctaccaacgaatacatcggatgtgagatcacagaagtggaagaccacgaagtgcgagctgcccgtgcctgcagaattaccaacctagatcgtgtgaccgaggatgatgaatcgctgatgagcgtcacccagaaggtgtccaagtttgtggaagaagccaacaagctgaaggacgctcagtcgaaaacgccaaaccgattcgttcgatgcgagtatgacgacatggacgaacatctcaagtcggacgagtgtctgctgagcgtgtcggataaggttacaaaattcatctcgactgcggaagaggtcaagaagatcaagacttcgggaccgttcgtgccggagtgcaaggttacggtggacgtggtcgagtcggatgaatgtttgaagagtgtgaacgagaaggtttccaagtttgcgactgtggatagtcagaagactacggaaaggaagacgacaacgatgaagactacgctggacgacatagatcgtagtttcgttgaggaagatgacgattcgctgctgagcgtttcggagaagaagaagaagttcatctccggaacgactgttccacagaagtctccggaactggtgaagaacgtcatgaagcagactagcaagcacgagaggaatttggatgaggatgttggcggagttgattcggaacacagaacgaacatcacggagcgctacacgacagctacgctgacgaagccgaaggacaaggtcccacagagcgtagcactccgtagcaccgaggctgtgaagaaggccaagcaattgttcgaaaatggaaacaaacctgcagcagcagaattggctagacagaaggatattttgagccgtccttcgatttgggaggatcgtcgaaagaaagaacaagtagctacggtaacaacgagtcagaaggacgtgaaactgactgatattggcgtttataagaaaccgcaggagaaggttgaacctgagcccttgaaggaagaaccggtgcagcccaagcaagaggcaccaaaatcacgtcgggacagtggtccgaagactcccgcatacatcaaggatacggtgtctaccaaaaaggacctgtttgaaaagcgaatttcatcgtcgaagctggaaaccagcgagctcatcaagtctaccacttctcaggaggaccgaaccgagtacatgtcaactggcaagcgtccttccattacggagaagtatgaacgcaccatcgctcgggatactccaacccctggaaacaagccgtcgtacatgaatcacacggtgagctccctggagcacatgaacaacggtcgtcgggagtctatcgatatgactcagcgttcgttgaaggtagaggaaactgttcagcaacaggacaccatcaagtctacgagtaaatatgacgcagatttgaagcgtgctgattcaggaaagaacgtgctggcagcccaggtgaagcgcaaaccttccattgattccacaatcatcgaagacatcttcgagcttgaggttctggagaaaatgctggagtcggtaactggctatgagcagcgtcggcgtatccgggcgcagattcggctggtgaagaagtcgccagcttcctcggtgacgactaccactacgaccactacaacaaccacgagaacaaacagccgcgttcgggagcctagtccaaagcgtaaggattcgagccctactcgaccgatgacaatgcgaaagggttcgcaggatactgaggccagggtaacgaagaccgtcgaggtggagaagaagactgagcaggctccgcgcagtgcaagtcccacgaaatccaaaccgttgaccaacggaaaggcaactacggctacgtcgacggttaccaccacgttgaagacttcccgctttggggaacgggttgcgccacaaaaagaggttaaggaagataagcccatttgggcaacgagtaacattctaaaaaaggcttcggaaacaacgcgtagcttcaggacaacatctaccaccagtacgccgaagaagactacaacaacgatgcgcgatgtaccgaaggaaaccaagcctacggattgtattacttcgagttacggtgtgggtccaaccgacgagaatggattgcctctgtttggcataagggcactgaagaagaaatccgcaccagctccggagccggaaactacgactaaggtcaccggatcgatcttcacggaaaccctgtactcggagaacgggtcagctccagtcggtgaacgaaagaccacgctctactcgtcggatgccaaggatttggagaacatgaatttgtcgagtagcaaacgaagcttggctgaggttcgcgagaagctgctggaacgtgaaaactcccgcaaaggactgatctcggtgacgaagacggagaaaatcggcaacggaacaagccatgtgacgaccgaggttggtgctctggaagatctaccccaacgggatgccaaggttgtccgaaaaggttccgttagggagctcacggagcgcttcgtgcacaaggaatcctcttcatcgctgatgtcggagaagacctacccgaaggctggcctcatcctgcgatctacccatagccactccagtcgttcatctaccccgtgtgagaacatgtcgctccggtccggatccgtggactttgacgaaaacgacatcgaactacgaacgagcgcggccaaatcttccttccgaacgacgtcaatggctgcgaccgaggcggaggaatgcgaagacggaggagtagtgttcaggaagagtcagagcagtagcagcagacagcagcagacgagatcgttcctgaacgacgggagccgggtgtccggagtgcaggacgtgctggatcggatgcggaatgccgataatgtggaagaatctggcgacagcgcagaagatcgggaagcgcgtgctttgctcaataagttcctcggagcgtcggtgttgatgagcggcatggagtcgatgatggccagcagcacgaaggaggaaatgtcgacagctgaaggttcctccgcgcccggttcaaaaaagaaaatatga

SEQ ID NO: 230 - DNA, 2149 bp, Aedes aegypti
aaacaaaccaacgtcaagcaaattgtagttcggtcgaacctaaattgggttgaacgggttgcactagttccatcctagattcaaaaatgaattcgacataaggtatacctccgttatcacctattacgagtgaattgcaggcgatctagcaattacacgcaaatattttcgatacgcttttatagtttaattggtcttaccagcaatcgttaatttattgagtctggtacgtaaccgcttcaagtcatcgtgcacttttttccatagaattcaaaccctttgacgtcatggagttaccagcaccacacacaatcagcgcgattggtgacacgttcgataactctcgaatcgcaattgataagattgcccggcgtgtaaaacaacgtatcgcgaccaatgtcaacgggaaaagtgaaagaaatcgacatcagtcgacttgaatcgttccaccgcaaaacttaacatcgtcggctgtggtactgcgcaggtgtgaaagaagagcaccattccagtcataataaacacaaacgcatatcgttcacgatgggattaaagctgaaatggttccgtcgtcgaatcaccttcgagggaatcccatcggcacccgaacgtaatattagaaggaaagagaatacttccggatttaccgctgttggagtctacagacagagcgtaaactttgaagactacattgagccatctagggcatcctacggtgagccaccaagtcaaccgtttgtgaccacgacaatcagaaaaccaaacacgtctacaacctcttcgacgattgcgaataagtcatcggaaaagaacaatgtaggagataagatagcacgacaacggcgatccattgaaacacctcccgagccaaactatttgccacctaagcctcctatgagacgagctgtcactaagacgaagtccacgccaaacatttcgacacttgaggaaccgtcagaaatacaaccaatcgagacgacccgatcaatagaagtactcaatgatgtgccagaaccgcagggaaatgcttccaatacacagacatctcgagctatcgcaatcaactacaatgcaggggttgatagcaatactactcataaactggcccaaaattatgaagtcgaacggatagaacattggaagcaacagcaacctgagtttttcaatgaaattctagagaaggtcaatgaattcgcaaacacttctaaacctgtaagggttgaagaagatcatggcagtgaaacagaatcatatgatgagattttcgaaaaagtcaaggctaaaccacgaggtcctctggaatcaacgattccattcgaaccgcagacaatcattaccaactctatcgaacaaaatctcagtcgacacacaagcgccagctcagtcgaagacatatttgaaccccgaccaccggaatatatgtttgcaatttctatggacgaagatcttgagaacgacacagtaaaacccgaggtagtcccaagaactccagaatcaaaacccagaattctggcagaagcaagtccacaacctgacagatcaacagagacaagtctaccactcgtcaacctgccagaaacaagtccacaacctgagaggcctttaaaatctatcctgaagaaacgcgctccagctccgccatctcagcaacctccgcaaacagaagctagcgctacaatcccgacagaagtacctattcctcccccgagaaccatccggaaacagccggatcccgctcctaaagagccaagtgatgacgatgatgacgattacctcaactggaatatgattgatcgccatcgttccagcataacccataccgtagcttcacaacgaattaacccagaaaccatgaaaaacgtgcctgccagtttgcaacaagcgaaacccctcttaaacaccagggccatagccgacgaagaacagcccaaaacgcttcgggaaatgcgcaaccgacaaccagctcccatatcacaaggcaacacaattcttggtcttcagagtcgaaatgcccgcgacagtgaatcgaacgtctccgaagcgtcagcatagagttgttgcgacgcgtataatcttatcttatctaatttaagcgaataaaatttaaaacaaaagtcaatcttacctgtgtaactttgccagcgggaaa

SEQ ID NO: 231 - DNA, 3017 bp, Aedes aegypti
gtagaactgatgtagttagtcgtgttgtctgcgaggtgtgatttcggaagtggtgaatctttggggaagctactaggggtatacgtgattgaagctgtgtgattttcagaattgtgcttcagatgactcgagcatttgtggttttgtgttgggtgttcgtgattggattgatcgtacaatgtgacgaggtgtcagcatttctaaggccaaagttcaaaccatttggaatggtccgtggtcctttcggtgctcctagacctctagcaagacacggtagaccttggctattggcaagtaatccaaatgctcatgaagatgaagaagaagaagaagaccataagcaagaggaagttgttcactctcctgatcatgtcgaagagatcatcattcctgagttactttcaacgctaattggattctacaatgaagacggcacggttcaaaaatttcatcaggtcgcaagaataccggagaagataccgatgaaagcactggagaggataccgatgaaagtaccgcagaagataccggagaagacaccggagaagacaccggagaagataccggagaagataccagagaagatgccagagaagataaccgagaaaattacggagaaaacatcagaaaagatgccagagaataccccgaaaaaagcccgacgaaagcggaacctaaatatccgaagacttcaacggtcaatcgcttatccgatcggacatttgatcgattcttttgagggcactgacaatggctacttgaaccactataacccgtgtggagatatctaccggtctggcgaagcttttgaaccacgaagagctgcacgcgaacttccgaaaattccttatcgaatgcgtcaaggagctctcagaaacaggtatgaatcattcaactcccatgaccacactgtagacagttctaacgataagggcttgcgaaggctcaaattcttcactcaacttagagatttcgaagatcttcttggagcggaaactgttccggcagaaatccaggcgattcgaaaactaataagccaaagtagtcctccagaaggtaccttggacttcaaaaacgcattgaatgagtaccttagcacggataaaaacaataccgtaggaagttcggatccctccgcggcaataccgaacaccgtcatatccattgataccactaccactaccgatactactagtactaccacttccagccccactgatgatgctgaaatatccgaaccacttgacaagccagacagtcctcccgcaagccaagtttcaccaggaaccgtcatcaactacaacttcttccaaattggatgcggtcgagacaacaatttgaagagaaatgctcaacaaacttgcctggaagctctgagtcaaataccgcacagaattgacaagcggaaaggagcgcccgatctggaactattcatggatggcaccagtatggagtcacctgtcatttacaacgaagacttcatcactatcccaactcgcaagatgttcaaacccagtcgcagcaaagccagcggaagaaaactcaaacagtggaagacacagcaaagtcttgcttcagaagagctggaagtggaagaatcacagccaaagcctacaatcgtaatcggctcgtgcgaatgcaatgacgaacccattcggtctcgaggcccgcgagattccagataccgcccaaaccgtgcagatcatctaccaattcggctttttactccacctgataattcgacgcctttaaggagaagtcctcagcttgtcacagacgatcagtctgatgctatcgcgcgacgattaagaccaaaatttggcctcaagatgaaaagtcgacgaacttacgaacctccgacgaccactacggagcaaaccacgactacaactacggaattacccacgacaacccaactagattccacctcacgcaagcgaatgcgttttcgaagtcgtcccaaaaagagcgttggtagtgaagaattctatgagtcgcaattggcaccggtcgctactgaagtacgacccatttcagtcacaccgtcacacgacaagccttccagaacaggcaaaggtcattggaagaaaacgatgaagttaaaaaacactggtcaacggacccaaatggcaaaaagtcgcgtccacgaagataaatgggaaaagatcttcgccttaaccaccgtacgatctctaccaagacgaagtatcaatgagagcccaatgcggaaacaagccaggcgagatcctcgctggcgcttgaaacgccaacaacagttcaaacaaagacgcttcagaggtttgcaagctcccgaaccagtaaacccagaaccgatcaatgtatttacaactacgacttcaagaccccgatcggaactcagggcggagcgtttgggacggacgaaacccactgatcctccaccacagatcaactacagcgaaccccttgaacgctcccaacccgcgcctaaacccaatccaatcgaaacaaacgatgaacgacgacagcgtagaactcgacccgtcaatcgccaagctagtcgaccccgattaagtactagttcggccgagatcatgagtatgggcccaccacgggaaccgattgtacagtcacgaacgggaatccccccatccatgcaggatttcatcatacgccaagtgaaagaacactgcgtgcaatgcaatccaaacgaagtcgtaaagaaccaaaaaagcagaagtgcgtcacctgcccggtattactcgtcctatagaaacaaaccccctcaaagcatacgaacgcctcggactcaaccacctgcgccatcggcgggcttcttcggaatgaatccactgcgaaccatattccagatggaaattttcaaaccgtggagaaacctactgaatggtaaaacgtcgatgtcctaatgttccacaatttagcccagtcaggactgccatcttccagctctaatcttcatgttcgcatttgtgattcttatcgttggaactgtcgaaataaactgcattttcactacc

SEQ ID NO: 232 - DNA, 1023 bp, Aedes aegypti
gaagaccacgacgaacttgaacaacgtcctccacaaaatccaggacaagaacaccatggagaacgtcctcctcaggaatcacaaaatcatcatggacaacgtcctcctcaggattcacagaatcccgaacaagatcatcatgcacaagcaccttctcaggaggcacaaaacgcaggacatcgtcctcttcaagaatcacaaaacccaggacaagataatcatggacaacgccctcctatggaaccccagaacccaggacaagttcatcaaggacaaggaccatctcatgaatcacagaacgcaggacaagttcatcatggacaaggtccttcttacgaatcacataactcattaccatatcataatggacaacgtcctcaccaaggctcacaaaacccagaacaaggacaccatgggcaacgtcctcctcatgaatcacaaaactcaggacatgatcaacatggtcaacgtcctcctcaggaacagcacaatcccggacaagataatgaacaagaacatggagctccacaagaagctggatcagatctacgagttgtcaacatcagtatcaatgaattgcatgatcaacatcctgaggaagaacattcagacaatgagagcgaacaaaatcatgatgttcgacaatacggagaagaccaaccatcaccgtcatattacagcaaggaagaacgtgatcagtacagagatgattcgcaacagcatcatggagataatggagaaatcgaagaccacgacgaacttgaacaacgtcctccacaaaatccaggacaagaacaccatggagaacgtcctcctcaggaatcacaaaaccatcaacaaaatcatcatggacaacgacaagatcatcatggacaacgccctcctatggaaccccagaacccaggacaagttcatcatgggcaaggaccatctcatgaatcacagaacgcaggacaagttcatcatggacaaggtccttctcacgaatcacataactcattaccatatcataatggacaacgt

SEQ ID NO: 233 - DNA, 801 bp, Aedes aegypti
tctttaagtccaaagcccaaaaatcaaagtccaaagcccaaacacctaagcttaaagtccaaattccgaagcccaaagcacaaagccctagtcccaaatcctcccaatgttcaaagtccaaagtccacagtccaaacaactaaactcgaagcccaaagtacaatgtccaaactacaaagtctaaagttcaaagttcaaagatcaaatttcaaatcccgaagcccaaatccaaaatctcaaagcccgaagaccaaagcccaaagcccaaaactcaaagcccaaatcccaaagccaaaatacaaaagcccgatcccaaagtacaatgtccaaactccaaagtctaaagttcaaagttcaaagcccaaatcccaaaacccaaatttcaaagctcaaataccaaagcccaaaaaaccaatcccaaatctcaaagctcaaatcccaaagcctaaagaccaaaacgcaaagcctaaagcccaaagtccaaagtcaaaagtccaaatccaaaatctaaagtccaaaatccaaacacctcgaagcccaaagtacaatgtcaaaactccaaagtctaaagttcaaagttcaaagcccaaagtccaaatcacaaagctcaaatcccaaagcccaaaaaccaaaacctatagcccaaagcccagagaccaaagcccaaagcccaaagctcaaagcccaatgtccaaattccaaagcccaatgttcaaagtccaaagtcaaaagtacaaagtccaaagtccaaagtcaaaagtccgaacaccaaaatctaaagtccaaaatccaaacatctag

SEQ ID NO: 234 - DNA, 1374 bp, Culex quinquefasciatus
atggtagtgatctctgctggcagcgtcgcgtccatcgaaatagacaaccggcttgtccaaccacagcatgattgcttcgagcggatagccctgggcgccatgctgcccttcgagaaaaccttccgaaattcggataccaactcactgaagatttgcgaaacactctgcctcaacgacaaggaatgccaaacgttctcatttggcatctccggccgaggtaacggcacctgccagctatcggcaaccattatcgacgcgaccaactcgcgccccatgggcaccatcttcgatcccgactttgatctctactcccgcaagtacaactgttttttagagtcgggtgggccgtccaatcctccgccacgacctgggggattgggtaactttccagccagcgaactgcccccgggaggaactcaacgaccaacgtcttcgtttcctccgtcggggccagttgatcgacctggcccaccgatattcactccggctggaacgaccgcaacgggagaaccaatctccacgacaaatggtttcacggacccaagaccaactagcgagtacccaggaacgttctcgaccagtgtcggaacaacctatggccagtccacaggagaaacgatcccagagactaccgctcctggtgaggagtactacaccacaaaggatcagacttcgtcaacgttaacaggacactactcaccacccaccagtacggcatcgggaccttcgatatccaaacaaccaacgggaacgatgcctggtgaagcacctacaaagtacccactcgatctacgacctcagtatcccattgcatcgggcccatcccggccgggtaaccatccatatcagtacccaatgttgtacgaaaccaactacccaatgccaaacagtaacgaacgattaccagagatctacgcccaaaacgtccccactctggacggtaactatctacgaccggaatatgccggatactttggaagaccctcgggaccctcggcaccaactggtaacatgaaaccggttgacaataccattacgggctatggcggaactggaccgcagagacctcctccggacagcaaaccatccggctacggaggtggaggtcccatgcgcccctcaggatccggatcaggaccaagctcttcgggatacggtattacgagaccagcaccttcacaaccacatccttcgggaccttccgcaacgggtagtggcatcggagacggctacaaagtcaccgaggacaagcatgacctacatccgacgacattccagcgacaacggttgaacgagagtaccccaaatgtcaaccctcgctatacaacgatcgactgtactttccagtcgcacaatcgcactcgtccacgctaa

SEQ ID NO: 235 - DNA, 696 bp, Culex quinquefasciatus
atgccgacgcagactatttcgagtcagctgttctacccgagtgagagggagaacaaagagagagtattcagtagcgattggtgtggaagtgacaaacgtttaagtcgaagtcaggagtcaggagtcaagagtcaagagtcaagagtcaagagtcaagagtcaagagtcaagagtcaacagtcaagagtcaagagtcaagagtcaagagtcaagagtcaagagtcaagagtcaagagtcaagagtcaagagtcaagagtcaagagtcaagagtcaagagtcaagagtcaagagtcaagagtcaagagtcaagagtcaagagtcaagagtcaagagtcaagagtcaagagtcaagagtcaagagtcagcagtcgccagtcagaagtcaagagtcaagagtcaagagtcaagaacggcgtcctcgtcgtcggcggcggtttgtgttcttccggatgtccctcgtcccaaagcccgcccagccagtgtgtgcccgttttgttttcgttaactttgcggtgacggcaaggtgtcctttctgtcccctggcaggactccacatggcccacatgttctgttggcatgtttcgtcagatgacgacacaacaacaatgggaaccggcccggcggcgagcaacggattttccgacctgcagcacgtggtgactcgtgtggaggtgttcaacggaatgtttaattaa

SEQ ID NO: 236 - DNA, 1134 bp, Culex quinquefasciatus
atggtgggttgtttggagacttaccatcaaaataaggagttgaacgcgcagtcccatcgtgtttccggttttggaactgcagcgggaaaaccggtcacctgtcaccacgtcgtcggaatccgggacacttgcggaacactacactttcacttgggggttggaagtcgtccggaaaaacgggttaaactcctcaagaagatcttgggtgggcacgagccttcgataacacactgtgcaattgttaggctaattgatgctgtgtgtacaaacgcaactagatcttcagaccgggattccgacagccatcaatcacccaatttgcaccttggccaggtatctggcccacacgcggcaaaacggttccttcggcacgtgaaggacggactagttcgcgtggaaggcaatatctctgtaacggacagaccacacggaaaatccgcagcggaaaatcgtcaaggaaaactatgctaccaaaacagcataaaccagcacacctccgttcggaccgagggccaaaagcaaactgaactgattttggtgtatgaactctttttaccagcgatcgagacgcttcttcagcagcagcagcagcaacagtgggagagagtgaacggagagttgcaactccaactccacgcgtttcggaagagaaagagtagaaaacaagaaacaagaaacaagaaacaagaaacgagaaacaagaaacaagaaacaagaaacaagaaacaagaaacaagaaacaagaaacaagaaacaagaaacaagaaacaagaaacaagaaacaagaaacaagaaacaagaaacaagaaacaagaaacaagaaacaagaaacaagaaacaagaaacaagaaacaagaaacaagaaacaagaaacaagaaacaagaaacaagaaacaagaaacaagaaacaagaaacaagaaacaagaaacaagaaacacgtccataatcccgaatcaccacacctcgaaccaaataaagacgttcagcttaaatttattcataactcaccgctcggcgcgacgatcatcaccactttgtcacacacgcacatatttgctgagagtgccaaagtcttcgataaattcggcacccgcaacagaacagttattcctggtgaccacaccgccacttga

SEQ ID NO: 237 - DNA, 1332 bp, Culex quinquefasciatus
atgatgaagcaggatcagaaacaagaacaagaacaagaaacaagaaacaagaaacaagaaacaagaaacaagaaacaagaaacaagaaacaagaaacaagaaacaagaaacaagaaacaagaaacaagaaacaagaaacaagaaacaagaaacaagaaacaagaaacaagaaacaagaaacaagaaacaagaaacaagaaacaagaaacaagaaacaagaaacaagaaacaagaaacaagaaacaagaaacaagaaacaagaaacaagaaacaagaaacaagaaatcctcaatctccaacctagtgctccccagcggcacgattgcctccccacaccgaacacaactgcagagactgttgcgttggtcccgttcggggggagcaactaatcacggcactcgcgcgcgcagcaagtgctccccaccgcggttgcaagtactaggagaccaagttattggagctcttcttcaagtcatcggggctccacttgacttcgtggagggcggggacatctccaacaatggccgcaccgtgaaatcccggaaaagtgtgcgcagagttgccgaacccatcccaactttacatcgcagtagtcctggagtttttgacgctaccaacccccggagaaagccaatcgaacgtgaaagcatcgtagcaggcaagatcctgcgggaactcttcgcgagttgcaactatttcgtcgcagatgtcaccctttgtgcgaacggaacaggacgccagactgcgccacggtgcaacctggggcgcaacaaaagtcgccctggttctttaaatcgcgcgcccacaacggcgcgtctcccaaaacgctgcactcctgatcgaatcgagagatatttaatatttctggttgcagaaacgagccgtccggagaccgatgttggcaccgtttcggaccctccgtccgtccggcatgtcacggttaaaagtccaccgtatcggctgacagctgacgcgacgtcgacttcgatgttggtagcgtcgcaacggagagttggagcgcgcgcccggccgttcgggccgctaacaccgcaaacgacacttcaaagcttgaatgctacgtccgtaatcgagaaggaactttttgcagttcctccagcactgccacgtgaatcactcgcaccgggtttacctcctgctgcgcagtctgccaggcaacacagctccgtataccaacacagcgctgctctcctggtcgcatcgttcgagaataaagtgttttttgttttgtttgctaatttacccgctgtcacaactcacctgctcacgctgggggtgctgctcaccctgctcagagctaccgctcgaatctag

SEQ ID NO: 238 - DNA, 3141 bp, Culex quinquefasciatus
atgggaaaccaactcaggcagggcagggactgcccgaatattccgatcttcctcaacccccttctaaatcaactgaacacaggtttggatttacgctctgacgggcgaaggcgaagattcctctctgaacactgccttcccgagcacgtcctcggccgtccagcatcaacgatatcgacaggccccggtggggttttcccacttttctgcgagattgacgtgtgccccatcaaggcaaaaccactcaaccacatcgctcaaaagtacatgcttgttcgtgatgtgatatctcaatcagtcacgcgatttcccatgtgctacgtgagcaaatcaacttcaataaatctcccgggaactggccgttccgtgtacctgcacggttggccacaatcgttttcggcaccaattaagaaatcggcacgtttttcgaaacaatgccgtcctgagtcacgccatatcgaagcgcgactttgtgcccccacgaattggccattttcaacgatcttgatgtgtttgcaaacgactttctatctagccctggcccggatggacggattgtcaccatgtgaaccacgccgattggcagcggtttctggtcctggactcaaccggacaatcggaatctggaattggcttggagtgcgttctacctttgcgatgaaatcgattctttctggagtctggaggacggggcaccatgaaagcgaaactgctgtaaattggattgctgacaagagtcccagaaaagattcccagacaagagtcccagacaagagtcccagaaaagagtcccagaaaacagtcccagacaagagtctcagacaagagttccagatcagagtcccagacaaaattcccagacaagagtcccagacaagagtcccagacaaaagtcccagaaaagagtcccagaaaagagtcccagacaagagtctcagacaagagttccacccagaagttcgagaccagagtcccaggcaaaattcccatacaagagtcccagacaagagtcccagaaaagagttccagataaaagttccagacaagagtcccagacaaaattcccagacaagagtctcagacaagagtcccaggcaagagtcccagaaaacagtcccagacaagagtctcagacaagagtcccagaaaagagtcctagataagagtctcaaacaaaagttcaaggcaagagtcccagacaatagtcccagaaaagagtcccagacaagagttccagacaagagtcccagaaaagagtctcagataagagtcccaaacatgagtcccaaacaagagtcccagacgaaagttccagacaaaagtttcacacaagactctcagacaagactcccagacaagagtcccaaacaagagtcccagaaaagagttccagacaagagtttcagacaaaattcccagacaagagtcccagaaaagattcccagaaaagagtcccagacaagagtctcagaaaatagtcccaaacatgagtcccaaacaagagttccaggcaagagttccagatcagagcaagagttccagatcagagtcaaaattcccaggcaagagtctcaaaaaagagtcccagaaaagagtcccagacaagaatctcagacaagagtcccagaaaagagtcccacaaaagagtcccagacaagagtcccaaacaagaattccagaaagagtcccagacaagagtctcagacagaagtcccaaacaagaatcccagacaagagttcaagataaaagttccagacaagagtcccaaacaaaattcccagacaagagtcccaaacaagagtcccagacaaatgttccagacaagactttcagacaagactcccagacatgagtcgcaaacaagagttccagacaagaatctcagacaagattcccagaaaagagtcccagataagagtctcaaacaagagttcaagacaagagtctcagacaagagtcccagacaagaattccagacaagaagctcagcgaaaatttccagacaagagtcccagaaaagacgggcaagagtcccaaacaagagtctcaaacaagaagtcccagacaagagtcccagacaagagttccagataagagtcccagacaaaattctcagacaagagtcccagaaaagagtcccaaacaagagtcccagacaagagtcccaaacaagaattccaaaaagagtcccagacaagagtctcagacagaagtcccaaacaagaatcccagacaagagttccagatcaaagttccagacaagagtcccaaacaaaattcccagacaagagtcccagaaaagagtcccaaacaagagtcccagacaaaattatcagacaagattttcagacaggactcccagacatgagttgcaaacaagagttctagacaagagtcccagaaaaaagtcccagaaaagagtcccagaaaaaagtcccagaaaagagtcccagacaaaagtatcagacatgattcccaaacaagagtcccagacaagagtcccactcagaaacaaaaaccaagagttcatttctggcgtcaaagacaagagctcaagtgcagagcccaagtccaacccaacccaggggcttctcccatcactgcccgaagactccagaccagctaaaccggagaccaaccagggactcggatgtgacctggttgctgtaatgggaaactgggacgccgcatcacatgtcccccaacactattcagagttcaagtccggaatccatggtaagagctccaagtctaagtccagaattcaacttcagagtccaagtccagaattcaagttcatagtccaagtccagaatttaagcccagagtccatgttaagagctccaagtccaagtccagaatccaagatcagagtccaagtccagcttccatgctcagatttcaagtccagaattcaagtgcagagtccaagcccagagttcaagtccagaattcaagtcaagagcttcaagtccaagtccagaattaaagttcagagtccaagtccagaattcgagttcagagtccaaagtcagagttcaagtccggaatccatgataagagctccaaatctaagtccagaatccatttctagagctccaagttcaagtccagaattcaagtttcagagtccaagataa

SEQ ID NO: 239 - DNA, 7149 bp, Culex quinquefasciatus
atggaagagatgacacgattagggagatggcacgaggcgcaggactttggccgcaagcgcgagatccgcgcgcacatgtacaaactgcgcgaggagcgcctcaaggaactgtacaacgcggtggaggtgcccgtcacgccaacgagggccgaactcatcatggagcagcaaaacacgacctccggcaagtttgggctgaccggcaagggcggcaccgtaacgggcggccacggcgactcgctgcccgaccagagcttcgagagcttcaagacgaaggagatccgcgactcggagagcccaacgaggttcgggacggtcatcccgtcggacaacagcggctggcacatcaagacctcggaggaggtcagcgcggacggtaagacgcacacgcagcgcagttcggccacaaccgagggcaccaaggaggtggatggtgggagaacttcgttcgcagggaagaatgaggaagcgcgcagcgaacggttcgagggtgacgagaagaactttgtgcacagcaagggcgatcagtcggcaacgttcctggcggagaacaccgtgatcgacggggacgatggatgcaagatcgagaaaaagtccacctcgatctcgtcgtcctcctcgtcgaaggtgatccgttcccagcaagtcatcggggacgataccgacttcgcgaggccagagcagcttgggtcgacgagcgcaacgactagcagcgttcaggagaccaagagcagcagtcacacgaccagaacttccagcagtacacagcagcacgagcagtcgctggaaacggacggcaacattgcgagcaagccactgtccaaggacccggaacgtgtcgcgaaggcattccggttgattgccttgcctggtacgatcatcacggaggatatcaccgtgatcaacccgtccaccaagatgatcaccacggtcaagcgtctcgaggacggtacggaagtcacaacacgaacgtatgagaaaattggagaacaaccctcgatggcgctggaaaacctgacgaaggagttgcgcagcaacacagagttgatgcgtgaatacgaggaagtgcagaaagctgaaactcgagcttccaagaaggacgtcgccgataagattaccaatctgcagttcatcgcggaagaacgctccgatacggcacgaaccgagcaaatcaagaagcaacagcagcacgaagtgatcaccacgtccaccaccaagatcacttccgacctggacgcaacgcacgattcgtttgcccgttcgctgcgctgtgtctctccaagcgaaagcgtccgatcggtccgctccaactcgggcagatccagcgtcagtccggacaagtccatccgggggagacgatcgccttcgcgagagtccgacaccagtcgattcagcactcacaccacaacccgtaccagccgtacggacgtctcgacgacccacaaggattacatgcgacccacgatcacgtccgagcgcaaggtgtccaacttgacggaagcgtacgacactgtggacaaaacgaagctcaaggaacgatcggaacgcttggagcgatcggtcagtccgaagaaggttccgcaaaacaccccggacgctactccatctcgtggtccgtctccagacaagctatcctctcgaccgatctccaaaacacccaaggagtcgtccccgttctgctcggtcaacagctcccgagctgcgtcccctatcaagcgggattcttcaccgtccaagatcacctccgccaagctggttcgtgaaaactcgtcggaatcgttcaacgttgacaccaccataaccgtctccaccaaggataaaacccagcagcagacacgcgaaaacgtcgaggtgttccacaccgaaagtcagctcaccgatctggacgacatcaccatcaacgtcaagctggagaacgtaaccgacgacatcgaggtaacgaccaccgtcgaagaagtcgacgtaggcgaccaaaaacccacctcagccaaaaaatcccccaaggagaagccacccctagtgcgcagcgaaacgttcgaagaacgctgccgcaagatcctcggcatgccgggccaggtagaaccggaaccagccgctgacaagccggagaagccggaaacaacgacgagcatcttcagcacgtacgacaacacgctaacgcgcagctcggagattcgcgagaagcgcaagaagatcgagcaggaaatcaaaacgatcgagtccgaaacgctgcgggctgcccgcaaaaccagccagctcctcgagagcgagcgagcgggcgagacgtctcccaccaggcggcagagttcgccagcgaagcagtcgtctccggtgcgcaagcattcacagtctccggtacgcaagtattcgcaaccttcgcccgaacgtcgtcccaaggacgactcaccggtcaagaagccggtggaaacgtcaccggttcgtaaggcatcacagccttctccggatcgtcgtccgaaggagcagacaccggtcaagaaaccaacagagtcgaaggagtcttccccggtccgtaagcaatcgcaaccttctccggatcgtcgtcccgtcgagaagacgcaagctaggaagcccgaggaatcgcccgtccgcaaaccatcacaaccctctcccgatcgtcgtcaagctaagaaaccggaagaatctccagtcaggaagcgatcgcaaccgtcaccggatcgtgcgccagcccagaaggagccctctccacacagatgttcccgttcccacgagcgttcacccgttccggtcgagaagcccaagactccgtctcctacaaagacgtccaccgacagaaccgacgccaccacgatcattcgaaccacccgcacgtccaaagccgacatcctggtgaaccagaagacggaaggcaagaacatgtctgtcacggagatcaccatccagccggtgatcgaggtcaagaaagcggacaagatcctcaccaagcagacgtcgaacagcaagtttgagcgcaagacgaccaacagccgggcggtcacgaacaagagctcgtcggactttgacgtgaagcggaaggccgcttacgagagaaccgaaaccgtggctgatcgaagcgctcgcgtgaccggcaagccacgtaccccagctacgagcccggacaagcgccgaactcaggacacgagcccgaccaaaacaaccgagaagagcaagcatcacatcacggtggcgaagatcaagatcgaaccggtccgcaagaccgtccagtcaaagtttgtggtcgaggataagtccaagacggcggcaaaaacgacgagaactacgaggaagttcgccaacgaaaccgagccggagtcggacaaggacaccggaatctcggacaacgagatggatgatgagacggtgacgaccgtcacgactactacgattaccacgaccaagaagcacgcgaacaatcaagtgacagatcggaaggattccgcacctgtgtacagaaccaccggcaaagtggagaagagctacactcgatcgtccagcgataacgtgctgaagacggccaacactaacaacgcaaagaaaacaacgaccacgaaaactacagccgcaacggcaaccacgacatcagccaagaagtcggtcgatagaccggtaaagtgcgtcaccaccaaaaccatcaacctgtccgccaaacccatgatcgactcggacaacctggacaacgttgtgattgacattcagcaggccaagtcctcgcgcgaaccgacgcccaacaagctgatcccgatcccggtttcgccagacgaagacaccggcaagccacgctatccggacacggtgcaggaaccggacgacgaaccgaagcacgtgcccaaggtcagcaacatcccgattctggaggaaaccagcaacgaatacatcggctgtgaaatctccgaagtggaagaccacgaagtccgagctgcccgtgccagtcgcatcaccaacctggaccgggtcaccgaggacgacgaatcgctgctcagcgtcaaccagaaggtgtccaagttcgtggaggaagcgaaccgtctgaaggatcttcccacgaccaagacgccgaatcgcttcgtacgccacgagtacgaagagctggacgagcacctgaagtcggacgagtgtctgctgagcgtgtcggacaaggtcaccaagttcatctcgaccgccgaagaggtcaagaagatccggacgtcgggaccgttcgtgccagagtgcaaggtaacggtggaggtggccgagtcggacgagtgcttgctcagcgtgaacgacaaggtgtccaaattcgctagcaagacaaccgaggaagacgaggaagagcgcggaatcgatgaaaagaagaaaaagttcatctctagcgctgtcgcgccgcaaaagtcgccggaactggtgaagaacgtgatgaagcagactacgcggtcggagctgcaaacacaagaggaagctgaagctgaacaaaagacgagcatcgtcgacagatacacaacggcaacgttgaccaaaccgcgggacaaggtcccgcaaggtgtgggcttgagaagcacggaagccgtaaagaaggcgaagcagatcttcgagattggcaacaagccagccgcagcggagctggccagacagaaggacatcctgagccgtccgtcaatttgggaggatcgtcgcaagaaggagcagacaaccgttgagaagactcaatcgaaaacggttcaagaaagcaaccagaaggacgtcaagctgatggacatcggtgtgtacaagaaggcacagcccaaactagagccggagccgaaagttgaggaacctaaaccggacatgacgaagcgtcgcgacagcggaactccgaaaacacccgcatacatccgggataccgtgtccaccaagaaggacatgttcgagaagagaatctcctcgtcaaagatcgacacgagcgagctcgtaaagtccactatatcgcaggaggaaagcaccgagctgacaacatcaacaaccaagcgaccctcgattacggagaagtacgagcgcaccatctcgcgtgagacgccaactccgggcggcaaaccgtcctacatgaaccacaccgtcagctcgctggagcacatgaacatgtcgtcacggcgcgagtcggtcgacaataccctgctgcagcagcagcaggaattcgtggaaaccacgaccgtcaagacgagcaagtttggcgtcgagctgaagcgaacggattcgggccgtaacgtgctgacgggatcgccgacgaagcgcaagagctcggtcgatagtccggtcatcgaggatatcttcgatttggaagcgctggagaagatgctggaatcggtgaacgggtacgagcagcgtagacggattaggtcgcagatccggctggttaagaaggcgggtgagaaggttacgacaacgacgacctccacgacgacgatgcgtacgaacagcagggttcgggatgccagcccgaagcggaaggagccgagtccaacgcgagcttcgctgcgaaagggttcacaggatacggaggtgaggacggtgaagactgtggaggtggaggcgaagaagtccgagccggttcagcgtagcgtgagtccgaccaagtcgaagccgatgacgaatgggaagacggttacgagcaccacgactgtaacgacgaagacgtcgagatacggcgagaaggttccagcgaaggaggttaaggatgatggtaagcccatttgggctaccgggaatattctgaagaaggcatcggaaacaacgcgaacgttcaagaccagttcaacaacaagcacggctaccaagaaagcgactccagtgatgcgagaggttccaaaggaaaccaagccgacggattgcattacatcgagctacggcgttggcccgaccgacgagaacggactgccgctgtttggtattcgagcgctgaagaagaaggcggctcccgcttcagatgttgagacgaagatcaccggatcgattgtgacggaaactctttactcggagaatggatcagcaccagttggagaacgcaagactacggtttactcttcggatgcaaaggacttggaggaactgaacatttccggcagcaagcgcaacctggctgaagttcgcgagaagttgctggagcgtgagaactctcgcaaaggattgatttcgctgacgaaaacggaaaagatcggaaacggaagcagccacgtgacgaccgaaatcggaaccctggaagacgttccccagcgcgaacccaagatcgtgcgcaagggatcagtcaaagaactaaccgagcgtttcgtacacaaggaatcctcttcctccctgctctcggagaagacctacccgaaggccggcctcatcctgcgctcgtccactcaaagccactcgagccgatcgtcaacgccctgcgagatcagctccatccgatcgggctcgatcgactttgacgagaacgatgtcgagctgcggtcgggcgccaagtcgagcaccgccgtgcgcgaaagcgtcgtcacgtccaccagctcctacgcgacgaaccaggaagaggtcgaggacgggggagtgttcttccgcaagagcagccggcagcagcagacgcgatcgttcctgaacgacggcagccgagtgtccggggtgcaggacgtgctggagcggatgcgcaatgcggataacgtggaagagtccggtgacagtgcggaagatcgcgaggctcgcgccctgctgaacaagttcctcggcgcgtccgtgctgatgagcggcatggagtcgttgctgcctggtggcgccgccaagggagaggacaccgaaccggcgtccggcacgaaaaaggagagcaaaaagaaggaggagacccggtggaaatcgggaggatgggcaagcgtttcttggaggagaaaagatccggaaccagaaacgaaacaatccggaactggttccgataaagtctggaagccatcggcgccgtcagcaagagctattatcacggccaaccccgtaaacgttttgaccccaagcgaccgcattccgaagattatctccggaaccgacaaaccagctaccacgatcacttcaaccctcacctccaagacaccaacctcttcaacgccctcgaaacccaccccaccttcaagtgccgccacttccggcgaaccctaa

SEQ ID NO: 240 - DNA, 909 bp, Culex quinquefasciatus
atgacaggaaaagacaaaggacaaaggacaaaggacaaaggacaaaggacaaaggacaaaggacaaaggacaaaggacaaaggacaaaggacaaaggacaaaggacaaaggacaaaggacaaaggacaaaggacaaaggacaaaggacaaaggacaaaggacaaaggacaaaggacaaaggacaaaggacaaaggacaaaggacaaaggacaaaggacaaaggacaaaggacaaaggacaaaggacaaaggacaaaggacaaaggacaaaggacaaaggacaaaggacaaaggacaattaacttgtttgactcggtcaaaattagactcaacttcttacaataaaaccctccaaaccagatctcaatttacagtaatccaaacccaaacctgtccagcccgtcgaaacaaactccctcctgccttgatcaaccgaggaccaaacagaaatcagtccggaacaaaagtcatcccaggaacccgtggctcatcaaccatatccaaccagaccaaaagctggaccagtcaagccataccagtccgggactatccttgttccatcacgcttgtgtttttgtactccgccgtgtctatcgtctacgagatgttcgtcgccggttaccagttccaagtgctgacgcccctcttcaccgtccactggggtctgcagaacaagaagagccggccggcgtggcgcgaacggcagaacaacgtcaaccggaagtactttgagatcttcaagcgggaagtgttcgcccggtaccacaaggatccgttgcggatgttgctgccgaagaaggtccaaaagcagcacggggtagggggaggaggtggtgcaggtgggggaaatgtggcggccgcgggaggagatgctggtggagggggtggtggcgaaaaaaccggacgatag

SEQ ID NO: 241 - DNA, 915 bp, Culex quinquefasciatus
atgccgaacagaacgcaagtctcggtagatcagctgtggtcggacgacgaggaagtgaccgcggtggggcctggcgaaaacgttaaaatcaaagtgaaaggcatagaagaggaggacgtctccccaggctttgtgctctgcgacgcctccaaccccatcaagaccggcaaggtgtttgacgcgcaagtagttatcctagaacacaaatcaattatctgcgcgggttactcggccgtgatgcacatacactgcgcggcggaggagattacggttaagagctcgaggctcacactcctgaagagctcgaagctcggagttttttttaacgagctcaaggctcacactcctgaagagctcgaagctcggagttttttttttaacgagctcaaggctcacactcctgaagagctcgaagctcggaagctcgaggctcggagttttgatttttttaacgagctcgaagctcaatgtcccgagctcgaagctcaatcccgagctcgaagctcaaccccgggctcgaagccctatcccgagctcgaagctcaatctcccgagctcgaagctcaatcccgggctcgaagccctatcccgagctcgaagctcaatatcccgagctcgaactcaatctcccgagctcgaagctcaatcccgggctcgaagcccaatcccgagctcggagctcaatatcccgagctcgaagctcaatctcccgagctcgaagctcaatctcccgagctcgaagctcaatctcccgagctcgaagctcaaccccgggctcgaagcccaataccgagctcaaagctcaacccagggctcgaagcccgatcccgggctcgaagcccaatatcgagctcaaggctctcagacacgctatttccagcgcgaggcattaaaatacacattttcacctactaa

SEQ ID NO: 242 - DNA, 1932 bp, Culex quinquefasciatus
atgaagtgcaataaccacgaaaaccgaagttccagagcaacaacgtcggtgcaaatcaccgacaacaaagccaagcgcaacttgaagccggaggttggcgctgctaaggatcgtcagtttgctttcgatgctcgacgcggggacttcgtgtttggatcgcggactctgattttgaagcggattctcgagcggatttttttggacacttcaatggaggcgagcagtaaatcgatggaaaatccttgtgtagcgatactgactattgccgaaaacctctcaacgaactacggtatggattatgaagcgtcttgcgtgcctgtggctgaagaccatccgttagaagaagagacgccggattggtttgaaagttttatcacaaaacacgagctacaggatgaagatatgccggatgcgaactgcggaagtctactgctagtccgacacgagccactggacgaagaaatgccggaagctacgagtaacgattccggtgttctgaacatcggaagattcttaggcaattccaacaacgagacgccgtcccattcagctgattttgttatttcatccgtcggcgttgatggtgtaccccaacttgaccaggtgaatgggttagacaatgcagtgtccaccggaatcgcctcgccaacctcgagcacgcaagagaccgcgagaatcttgaatccgtcgtggttctcaaatccggccttcgtaaatgacgcggtgtccagcgatggcagttgtgcgacccggccgacttcgaggacgcaagagaccgcgagaatctttactccgtcgtggtcctcaaatccggccttcgtgaatgacgcggtatccagcgatgagaccgtgataatcttaactccgtcgtggtcctcaaatccggccgtcatgaatgatgctgtatccagcgatggcgattgcgcttaccacgatttcagcaactcggtattgacaacccggccgacctcgagaatgttgactccgtcgtggcccataaatccgtccctcatggatgaaccggtgtccagcgatggcaattgcgcgacccggccgacttcgagcacgagtctaccaaacagcgtttgccctcctaaattgcttgccgagaagtttatgctacactatgttgcaaataacataattcgtccaaaacgctcgtcgcttgacgcacttgcccccgaaagtcatgtcaagggcattttgctgtcacccaaagacagaaagacagaaagacagaaagacagaaagacagaaagacagaaagacagaaagacagaaagacagaaagacagaaagacagaaagacagaaagacagaaagacagaaagacagaaagacagaaagacagaaagacagaaagacagaaagccagaaagacagaaagacagaaagacagaaagacagaaagacagaaagacagagagacagaaagacagaaagacagaaagacagaaagacagaaagacagaaagacagaaagacagagagacagaaagacagaaagacagaaagacagaaagacagaaagacagaaagactgaaagacagaaagatagaaagacagaaagacagaagacagaagacagaagacagaagacagaagacagaagacagaagacagaagacagaagacagaagacagaagacagaagacagaagacagaagacagaagacagaagacagaagacagaagacagaagacagaaagacagaaagacacagagacagaaagacagaaagatagaaagacaggaatacagaaagacagaaagacagaaagacagaaagacagaaagacagaaagacagaaagacagaaagacagaaagacagaaagacagaaagacagaaagacagaaaaacagaaagacggaaagactgaaagaaagaaagccaaaaagacataaaaatagaagacagaatacataa

SEQ ID NO: 243 - DNA, 996 bp, Culex quinquefasciatus
atgacatttgagaagggctgtagtaacctggatagtaaattagcttatatctgcacgcccatgaatccaattgaaatgtggtcaaagacaaacttaaaggaagttggacgagctttccgcgaccggaccggcaagactgaggtcgagctcaaactccgtcagattcaggctctgtccccgagaaaacccccaaaacgacacggttcggtttgtacccaaaaaatgaagaagtggaagattgtgcaaacccagacggggtcgacgtcgtcgtcgtcgccggtgttgacccttgagagaatcattcttcatgaagtgaggcgggttatcgtcgtcaatcaaggcagggatcacggtcccgcaaagttttcgggtgggattgtccttggtggtgggggacacggttgccaggttgagggttttgtcagaaattttatccaacccttagtgttgttcgtggtgttgagatggtacgtgggtacacagccgaaaaacgataaacgagtaacaacaacaaccttacttgggaagtgtaacggatcaagtccccagatttgggttagatttgagccagaggttaagaaacaggaaacaagaaacaagaaacaagaaacaagaaacaagaaacaagaaacaagaaacaagaaacaagaaacaagaaacaagaaacaagaaacaagaaacaagaaacaagaaacaagaaacaagaaacaagaaacaagaagcaagaaacaagaaacaagaaacaagaaacaagaaacaagaaacagaaacaagaaacaagaaacaagaaacaagaaacaagaaacaagaaacaagaaacaagaaacaagaaacaagaaacaagaaacaagaaacaatcaacatgttcagcaacacatcgtcgttcgctcgcaggttttgatttgtagtgcaccttctggcagcaccttaacttctgtggcaccaccaaccagaccccgtgggaactcctccgagctccatttatttgggcactaa

SEQ ID NO: 244 - DNA, 1242 bp, Culex quinquefasciatus
atgccatctcccccgtccagttttcaacgttcttcactgacgttcaccagaacacatcaagagttccacatcaacccggcgagaagtgctaataaaaactgctgcggttgcataaactgttatgagctgataccgcccgacttggagctggacctggaccgatttttaaatacgaagcatcaagtaccatgtgccagatacaaagtgccaagtactgagtgccagataccaagcgccaagtgccagatacaaagtgccaagtatcaagtgccaagtaccaagtgccaagtaccaagtgccaagtaccaagtaccaagtgccagataccaagtaccaattactaagtaccaagtaacaagtaccaagtatcaaatacgaagcatcaagtaccaagtaccaactatcaagtatcaagtaccaagtactaagtgccagatacaaagtgccaagtaccaagtaccaagtgccaaatgccaagtaccaagtaccaagtaccaactatcaagtaccaagtgccaagtgccagatacaaagtgccaaacaccaagtgccaagtaccaagtgccaagtaccaaatgccaagtatcaagtaccaattaccaagtaccaagtaccaagtaccaagcttcaagtaccaagtaccaagtgccagataccaagtaccaagtaccaagtatcaaatacgaaggtaccatgaactactaccaactaacaagtatcaagtaccaaatactaagtgccagatacaaagtgccaagtatcaagtaccaagtgccagatacaaagtgccaagtatcaagtaccaagtgccaaatgccaagtaccaagtaccaactatcaagtaccaagtaccaagtaccaagtaccaagtaccaagtaccaagtactaagtaccaagtgccaagtgccagatacaaagtgccaagtaccaagtgccaagtgccaagtaccaagtaccaagtaccaagtacccatgcaagtaccactacaaccaccactgcaggccaacctggttccatctgcccacaatacacaccgattgtcacgaagctggtcccagaggtacctatatcgaagaggttaaccatcatcaagaagttgcgtgacaagagtcgtcatctggccacctatttactaagttgccatgcagatgcaccagaaccagttcagcagacctctccacaatgccgtgtggccatggcctcagaagctgcaatcgtccaagtcttcgcagtggcctag

SEQ ID NO: 245 - DNA, 1572 bp, Culex quinquefasciatus
atgctgcagcgatgcaagtctgaagcccggtttcttgccaataagattatgctggaggggaagattaaggtagaaggattcacgctaaacagagcagcggtgcaccgtcgtcgtcgccgtgggaagttcgatgtcgtgtacacaatcaaaaatttaattcttatcaacattttggggcgggatgcagagtgggtgttcaaagagtctgttaggacagccccgaatcatggctgtcaaactgaaagggttgggaagaagaatgaacaagaaacaagaaacaagaaacaagaaacaagaaacaagaaacaagaaacaagaaacaagaaacaagaaacaagaaacaagaaacaagaaacaagaaacaagaaacaagaaacaagaaacaagaaacaagaaacaagaaacaagaaacaagaaacaagaaacaagaaacaagaaacaagaaacaagaaacaagaaacaagaaacaagaaacaagaaacaagaaacaagaaacaagaaacaagaaacaagaaacaagaaacaagaaacaagaaacaagaaacaagaaacaagaaacaagaaacaagaaacaagaaacaagaaacaagaaacaagaaacaagaaacaagaaacaagaaacaagagcttttgatgaaaccagcaaaggttgatgttccagtcctgttccaacaaaaggctcacaaattgatttccacatccttcggcctcagtcaatcttccccgcaccttacgcagccccaaacccggagttccgagttgatccattggccaaagggcacacgctataatttatcatcgttactatcggataagaaaaatgaacaagtaaagccgttcggttctggcaactccatgctgctggcgaacaataaaagtcactttcccgagaaaatgggacagagcgaatgcctatgggctggcaagaccaagttttccggggatcaactggaaggtccacttgactttacagcaagcgcacagcagtgtgaaggatttcggactcttgagtggatgctcgccgttggtggtggctgtcctggaaggcaaaagtgcaaacgagaggataatgcccaaatgactggaggctatcccttgaatctttacaatctgcagggagcttttggcttgaatcttccctcagcagcaggtaaaacctggccacacgacacttgtgcccggtgtgatgagatgacatatatttttttcaccgccgccgccgcgtcgttacctctagagcagaaggttttttttgccggattttccacaccgtttttccgcgatggcgttaacatatgtgtcgaggtggaggaggcggaacaagtcttatgcagctcggtcgacgacgcatacttcaacgtcacagtttccacacaagccctagaaacctccaaacacattgctctagcagctgcttgcggtcgaacaagcatcgagtggtggagaaaccttaaaccggcgcggcaccacaacactccgtccagtaaacctcgcgttgaagccccagctgaaagcgtatcagtagccgcactcaccctggcccctgtagtgggtgcacattccctgggataa

SEQ ID NO: 246 - DNA, 1965 bp, Culex quinquefasciatus
atgataactggactgtttgagaatccaaacttgtatgtcagcctctctctgctgctatcaacctccctcctgtgcagcaccgccgcccccgactcttcgagctacctcgaaaatgacgtgatcgctccccagcacaagctcatcaacgagatgaaccagaacttctccgagctggaaaaagccagcgaaaagctgatcgatctgggctcgtacgttggcccccacaaggtcccgccgaaaacggtcaagatcaccaacaccgtggccgtgaaggttccggtgccatatccggtcaaggtgccccatccggttccggttccagtgcccgttgaccgcgtggttccgctgccggtgcccaagcttgtgcgcattccggaaccgactgcggccataccaacggtgacctctccggtgaactacgtgacttcaccgcacccacacgagcaggacgtggcccactcgaacacgaacgcccaggttcaggagttcatgcactcgtatccgattcactcggtgtttgatgtgggcatgaactacaatccggtgattgggaatcgactggcgttgaacaagccgacgggggctgcctccgagcatcgaccgagacatttgggtccggaacttgacaagttgaacgagtacagtgcggctagtacgcggtattcgagcaagcagaactacgagggtggatttagatcgacggctagtccggatgagtcgggatatcacaagtactactcgactgctcaaccggagtcggcaccttccgcgaattacgagtacaagttctctagtccccaccctgaagttattcctcactcttacagagagcccaagtctgtgtattatacaaaggacgacaagtatccgacacccaagttccctagacctacacactctgcttatcctacttctcctacgttccaaaccaaagacccgtcgtacggtcaggagaacgacttccgacagtacagcttcaagactgcaccaactcctcctagcttccgccatacctcaatcaaagaatcctatccgcactacgaacagcctgatttcaagcagtaccattaccaaaagccctctgttgaaagcgaaagttacgtagaacatcagccaaagcactccaagtacattgagcactacgagaaaccatcgggaagtgacaacggttacgtagaacatagagaagttggagagtcctctgcggtgtacaagcagtacgaacagcaaatcgaatccagtttcgaggatcaacgggatcagtacggcaagcccagtgccaaccccgagatctactcgcactacgaagctaaggaaccccaacagcaagagtacaaatcgtactacgctaggcctatcccggtttcggaagcactggcctacctagacaagcaaccctcgcacggttccgagcagaaagtgtacttccacaaacccatgaactaccaagtgagggcgcacaaaccaccccacaagtcccagcactcttcggagtccaccgacctaacctacaacttccccagcgattcgcaccttcatccgacctactcggagatcgagcacaagcaccatccctactacagttcgaccgcggaacatccctcctttgacgaggaatcctcgggagcgcccaagtattaccaccatcccagtccttcaccttccccctccccctcctccaaccatcacgtaatcgcgtacaatcacccttccggccccgagcagtaccagcgacgtcagtactacttccggcacgaaacctccgacgaggccggttctgccgaggccagttccgacatgatgcagtccggctcgaagtcgcacgcggcgtacgagcgagcggtcgaactcaagcaccgcgctgccaaccccaaagagtactccatgtacagtgttgagcacctgcaccaccatcacggcgacgtggacgactccaacgactacgacggaagagattaccagtag

SEQ ID NO: 247 - DNA, 1230 bp, Culex quinquefasciatus
atgaaaggaaaagaagcaaacgcgatagcctgcttcgatgaaaacaaacccgcgaaatctcacaccgagagctgctgcttgtatggtcacttcgttggccgcgcgcggctgaccgaacgcggtgaaaagccgaagtctcgtggcggcagcagcagcaggctacgacgaacggccgcgacggttccacaaacactgacgcagtacaacgcggcatcggcgaacgaagctggccatgcgtggtgtggtcgtcgtcggactcaagactcaagactcaagactcaagactcaagactcaagactcaagactcaagactcaagactcaagactcaagactcaagactcaagactcaagactcaagactcaagactcaagactcaagactcaagactcaagactcaagactcaagactcaagactcaagactcaagactcaagactcaagactcaagactcaagactcaagactcaagactcaagactcaagactcaagactcaagactcaagactcaagactcaagactcaagactcaagactcaagactcaagactcaagactcaagactcaagactcaagactcaagactcaagactcaagactcaagactcaagactcaagactcaagactcaagactcaagactcaagactcaagactaaagactcaagactcaagactcaagactcaagactcaagactcaagacccaagactcaagactcaagactcaagactcaagactcaagactcaagactcaagactcaagactcaagactcaagactcaagactcaagactcaagactcaagactcaagactcaagactcgagactcgagactcgagactcgagactcgagactcgagactcgagactcaagactcaagactcaagactcaagactcaagactcaagactcaagactcaagactcaagactcaagacagctttacatcattggcaggttgcccccggtgatgactggggttcgcccgggcatgccaaaaaagggtgaaatgaaaaacacgggactgcgggctcatttggtgtttggggcgaaattaggagcggttggtgcatattttggttgcacaacaggtttaggtttgaagttcctgaaattcagcgaaggggaaatggatcaattaaggttgagaaccactgatttaggaggagcggacatattcggagcaaaagtacgccatccaatctgcctgtctccaaagctgtaa

SEQ ID NO: 248 - DNA, 1029 bp, Culex quinquefasciatus
atggattacatcccacaaagtcatcccggatacagttatggcattgcgcagccctcgttcaacttgccacagtactcgggccacaagtactttggcatgccgtcgtacaagtttgctgccgctccgcagagttcattttttgctccggtcagccagcatgggttcaattcgctcgcggacagttcggtaaagtatagcattggctcgaaggaacttgccgagctgatcaaggcgctgcactcaccgagtccagcaatttcgatcaaggccgtccccacgggtcatggttgggatacaccgtacagttatgacgcgtttgcccactataagccaacaatgtacaaagttcatgagatatctccgtcttatggagctccgttggcaacaccctaccttccaccgagttatggtattccacaacaactatcagaaccaacgtatcccactggagcaaagggagttaggcactacgcatcatcggtcaatgcacccgttccggacatctactccggaaacaagtacatatcggccatcaagccaatcaacgtccaaactccggcccaggttgtatccccgttgcacacctcgatccacgcccagaaaccattcaaaccttcaacctaccttggatcttccaacgatatctccgattatacccaaacccagacacccacctcatcatccgctcacaatgcttaccttgcccctactctgcagtaccttccgccagccaaacctcagaacaaaataacctttgaccagccctccaagtcctacctgccgccagtaccagtcaaaaccaacaacggatatctaccaccgccaaaaccggccaacacgtacgtcccagtagcatctcccaaccacaactacattccggtgagctcgaacgatgacaacgtcaagcactaccaacacctgcaaccaccgcacagctcggaagagtccaacgagtctgcgtacgattaccacgcgtcggccccgtccggcactacggccaagcctcaccaccacccgtggcaaccttag

SEQ ID NO: 249 - DNA, 1488 bp, Culex quinquefasciatus
atggacaccattgaagcgaagaaacccgtcttggaaccattcgacggaggagaacacgcgactgaagccgacgaagatgctagcttgaatcgagcactgattggagaggaaggcaacgaagatgtcgatgccgtggaagcagccacattggttcataaagagagcgaaccgcttttcgattttgaagcaagcacggaggatatgccacacttggtagtggaaagctcggattccgagagcaaagtgtccacatgcaccgttcctgagatgccacaaggctctccatccagatctccggccacaaactttgaagtacctgaaacggaatcatcctcacagaagactgaacaacaaacggactcggaaggctacctcgagttcggacaggccctgggttgttgcaactcggaatcggaaatttccgcggatacagtcattggcaaagccgatcaccagccctcgattctagaggaaaagtacaactttccgatcgatcgttttctgcgccgaaagtcctcgtcctcgagtgaggctcagattgtgtcaaaagaaagtgtcgccaaaagcccagccgtatttgtgtccagctcaagctcgaacggtccagcacgggaaaaatcgcctgatttgtttaccgataccgaagatgagctggatgagacggcaaagaaagactcaatcgacgatacgataacaaagctgcttatgaaaagtcctgttgatttggacaaaacagtgtctcaacccgcccccaaattcccaaagaataacgtaagcacgccaatatctaagctcattcacgcacaactgcaaacaacacccggaagttcaacccaagacgcctcgtccgatgacatgtttgccgatgtgacggtacgaaaagctgcagatcccaaccgcacggacgtgttcgaaataaccgacaacaacgcgttcggcaaccaaattttagtacacaccgaacgagcctgcatgtccccgctgcagcaagactcggaatccgatgttcaattcgtaagtgtggttcgccaaccggacgatccgatcgagatcgtagatctagacacggaagtgagcacaccgaaaagtcaaaccggaagaaatgtgcacaaaacgccatcgacgaccggttcgggcggaactccccgtggctggttgaccaagagtagccgccactcatcggacggtggttcgccgcgtacaccaacaaactcaaaacgctcaaccaagtgccgccgaagcgaccacggcagtggaagtggcttcaagcgtaagaaacttgataactggttccaagacgatgacgatcgcggtgcggacggcgaacgagcttcgacgagcgtgaacaaacgaaaatcggctccgggaggaagcggaggtggcagtaggaaggtctcgccgcggaaaaagtgtttccaggagagggttttacaccgatttaatcaaattctagtgtcaccaacggggtttgatagtgactttgaataa

SEQ ID NO: 250 - DNA, 336 bp, Culex quinquefasciatus
atggcgattcgcgtgctgcccgatcacgacgtgccggatagaaatgtattgctgaacacgcatgctaacgaattcggcttgcacccgacctcgtacacttttccgaagtgcaagtcagaagtcagaagtcagacgtcagaagtcagaagtcagaagtcagaagtaagaagccagaagccagaagtcagaagtcaaaagaaagaagtcagaagccagaagccagaagtcagaagtcagcagtcagaagtcagcagtcagatgtatgaagccagaagtcagaagtcagaagtgagaagtcaaaaccaggtgatggatataagaacgacagtgcgttaa

SEQ ID NO: 251 - DNA, 1566 bp, Culex quinquefasciatus
atgccaacccgaggagcatctggaattgtggacgtcgctccccgctccggtggcggtggcgtcgtggttcgagattatgaacaaagaacaaagaacaaagaacaaagaacaaagaacaaagaacaaagaacaaagaacaaagaacaaagaacaaagaacaaagaacaaagaacaaagaacaaagaacaaagaacaaagaacaaagaacaaagaacaaagaacaaagaacaaagaacaaagaacaaagaacaaagaacaaagaacaaagaacaaagaacaaagaacaaagaacaaagaacaaagaacaaagaacaaagaacaaagaacaaagaacaaagaacaaagaacaaagaacaaagaacaaagaacaaagaacaaagaacaaagaacaaagaacaaagaacaaagaacaaagaacaaagaacaaagaacaaagaacaaagaacaaagaacaaagaacaaagaacaaagaacaaagaacaaagaacaagaacaaagaacaaagaacaaagaacaaagaacaaagaacaaagaacaaagaacaaagaacaaagaacaaagaacaagaacaagaacaagaacaagaacaagaacaagaacaagaacaagaacaagaacaagaacaagaacaagaacaagaacaagaacaagaacaagaacaagaacaagaacaagaacaagacaagacaagacaagacaagacaagacaagacaagacaagacagacagacagacagacagacagacagacagacagacagacagacagacagacagacagacagacagacagacagacagacagacaagacagacaagaacaagaacaagaacagacagaacagacaagaacaagaacaagaacaagaacaagaacaagaacaagaacaagaacaagaacaagaacaagaacaagaacaagaacaagaacaagaacaagaacaagaacaagaacaagaacaagaacaagaacaagaacaagaacaagaacaagaacaagaacaagaacaagaacaagaacaagaacaagaacaagaacaagaacaagaacaagaacaagaacaagaacaagaacaagaacaagaacaagaacaagaacaagaacaagaacaagaacaagaacaagaacaagaacaagaacaagaacaagaacaagaacaagaacaagaacaagaacaagaacaagaacaagaacaagaacaagaacaagaacaagaacaagaacaagaacaagaacaagaacaagaacaagaacaagaacaagaacaagaacaagaacaagaacaagaacaagaacaagaacaagaacaagaacaagaacaagaacaagaacaagaacaattttgtaattttaattttatgaattgtttatcatatgaacccctgacgtcctttgctttcgatcagttaaatgagtgtacgtgccgtgccgtgtcatgcggcgaatctccacattctgacgccggtaccgccgacggcaaggacgggggtgtattcaccctgtcacagtggcttatcaaggactacccggggacgagagatggagagagagactgggtttcttaa

SEQ ID NO: 252 - DNA, 1491 bp, Culex quinquefasciatus
atgggattaaagctgaaatggttccgaaggcgactcaccttcgaaggaattccatccgcgccggagcggagcacgcgccgaaaggagcacaataccggaattaccgttatcggagtttatcggcagagcgtgaattacgaagactacattgaaccgacgcgatcatcgtacagctgggaaccggcgagtcatccctttgtaaccaccaccatcagaaaaccggccacgtccgtaccattagcatcgacatctgctgctgcaacaacgacgacgacccttgagaaacgcaccgcttcaccagataagatagcgtcgactccgaagacgaagaagtcgtcaacaccggccagagaaacgcctccacagccgacctactcccctcccaaacccccagttcggaagagtctgaccaaaactaaatccaccccaaacatagcgaccgcggcggcatcactagaaccggtaacgctggaggtgacccgctccgttgaggtgctcaactacggttcggttccgctgagtcggagtcccgcggccagatctacaacaatcgtaagcaggaattccgacaccgaaatctacaacgaacgtagtgttgatgttgacggcgattcgttgggttcgtttgggaaggtcaagagcaccaccaggtcacctccaccggaaccgaagagtccagagacggtgcccgaggagttgtggaagcagaagcagcccggagtttttcaacgaaattctgcagaaagtttggcagcagcgtccaaatccccggaactcgatcggccagcaaaaccgaaagaaccagcgttggaggatgacgccgaatcgttcaacgatatattccaaaaggtcaaagcgcgacctcgaaaccctgccgatggccaggagtctcccaagccggaacccattgtcgaagcattccccatcaaccggaaacgatcgatcgaggacatcttcgagccacggaaaccggaactggttccagatgttcttataaccacagccccgcagatcgtagaccccaacccgtctccaaaacccatcaaatcaatcctgaagaagcgagctcctggtccaccaccaacctctccccaacccgcaccaccaacggtgaccatggaaatcccaacgccaccccctcgatccattcgcaaggaggaaccaatcccgatgaaacgaaccgtcaacgaagactccgacgacgacgactacgacacctggaacatggtcgaacggcaccgatcctcgatcagccaaaccgccgcccgtgtcgatccggaagtcgtgcgaaacgtccccaccagtctgcagcttccgcgacaatccgtcccatcggaaccgccgcgaacgctacgtggcatgcgagactaccaccacaaacaacaacaacccaacgccagcagcagtgacggtggtgacggtctatttctgggaagacacgcacgcggcgctcgtgacagcgaatcgaccctttccgaagcgtccgcctaa

SEQ ID NO: 253 - DNA, 510 bp, Culex quinquefasciatus
atggcaggcgacggggaaattggagtcacgcctttggttgctgcggtggagcttgctgggtgtgggtcaggctgcaatcaatttcgtgattgctccattggaagtgactttggaattaccttcccgcctgacggtggaatgtgcttcgaccggccgggtaggatgctggtcttcggttgtaataagggacgcgacacggtcagcagaaacatcagtggaaaaaatcggattgtagtatgcaatgcatgccccctccggttcgtgggaaagcatccacgctggagaaatccagaatccagaatccagaatccagaatccagaatccagaatccagaatccagaatccagaatccagaatccagaatccagagtccagaatccagaaaccagaatccagaacccagaatcaagaatccagaatccagaaaccagaatccagaatccagaatccagaatccagaatccagagtccagaatccagaatccagaatccagaatccagaatcctga

SEQ ID NO: 254 - DNA, 1023 bp, Culex quinquefasciatus
atgtactgttgtaattttaaacaagaaacaagaaacaagaaacaagaaacaagaaacaagaaacaagaaacaagaaacaagaaacaagaaacaagaaacaagaaacaagaaacaagaaacaagaaacaagaaacaagaaacaagaaacaagaaacaagaaacaagaaacaagaaacaagaaacaagaaacaagaaacaagaaacaagaaacaagaaacaagaaacaagaaacaagaaacaagaaacaagaaacaagaaacaagaaacaagaaacaagaaacaagaaacaagaaacaagaaacaagaaacaagaaacaagaaacaagaaacaagaaacaagaaacaagaaacaagaaacaagaaacaagaaacaagaaacaagaaacaagaaacaagaaacaagaaacaagaaacaagaaacaagaaacaaaatcaaacaagaaacaagaaactagtttcaagaaacaagaaacaagaaacaagaaacaagaaacaagaaacaagaaacaagaaacaagaaacaagaaacaagaaacaagaaacaagaaacaagaaacaagaaacaagaaacaagaaacaagaaacaagaaacaagaaacaagaaacaagaaacaagaaacaagaaacaagaaacaagaaacaagaaacaagaaacaagaaacaagaaacaagaaacaagaaacaagaaacaagaaacaagaaacaagaaacaagaaacaagaaacaagaaacaagaaacaagaaacaagaaacaagaaacaagaaacaagaaacaagaaacaagaaacaagaaacaagaaacaagaaacaagaaacaagaaacaagaaacaagaaacaagaaacaagaaacaagaaacaagaaacaagaaacaagaaacaagaaacaagaaacaagaaacaagaaacaagaaacaagaaacaagaaacaagaaacaagaaacaagaaacaagaaacaagaaacaagaaacaagaaacaagaaacaagaaacaagaaacaagaaacaagaaacaaaatcgttaa

SEQ ID NO: 255 - DNA, 891 bp, Culex quinquefasciatus
atgcttccggctgaatcgcagcgggatgaacgagggggcgctgatctgagcgacgatccaaacggattctgcgaaaagttcattaaggaatgtctcgagtgcgaggacttccgtgactcggccgtctacagcggagacgacacgcgggcggacgccaaagaccagttcgcatacgccgcgtcatcgtctgcttcgagcagctccaacgttgcgagaccaccgccgattccggtcaagccggtccacttagaaggacgaagggtggccgtaaagattgaaggacctaggcagagtgaagaagtacgtctccagtcatgtgatgacgtttctgcatgcctgtctttacggaagccagaagccagaagccagaagccagaagccagaagccagaagccagaagccagaagccagaagccagaagccagaagccagaagccagaagccagaagccagaagccagaagccagaagccagaagccagaagccagaagccagaagccagaagccagaagccagaagccagaagccagaagccagaagccagaagccagaagccagaagccagaagccagaagccagaagccagaagccagaagccagaagccagaagccagaagccagaagccagaagccagaagccagaagccagaagccagaagccagaagccagaagccagaagccagaagccagaagccagaagccagaagccagaagccagaagccagaagccagaagccagaagccagaagccagaagccagaagccagaagccagaagccagaagccagaagccagaagccagaagccagaagccagaagccagaagccagaagccagaagccagaagccagaagccagaagccagaagctgtttcctctcgattttttga

SEQ ID NO: 256 - DNA, 891 bp, Culex quinquefasciatus
atgctgaactggaagcttgcgttagcgcttgggtgtgctctggccagtgccgtgagcgccggaaccgatccggagcgggcccgggccagttcgtacatcttccggagttttgacgcgacgccgagtcacgtggtgtatctgagtccggcacgatcgcggttggtgtacggtggaaagcacgaacctattagggtgaaagccaacgtggagagtgagagcagtgaagaagacggaagtgatgaacacgatgagccaaaggtgttacaagtgaagcactcggaagagtctggggaatcttatgaggatcaacgtcactcgaagaagggtgaacacgatcggaaggggtataatcggaagcatgcgctgaagaagggaagcaaaggaagttacggcaaggaggatcagtctcacacgtatgctaacgaaggggatcgcaagaagtcgtaccacgatgaagactcgtaccacaaggaccatcacgacgaaggtcatcaggttcgaggaggaaaacatggtgaaaagaaatctcacaagaaaggttccaagaccaccgggtaccacaacgtttaccacaaggatgagttcaagaaggagcacatcttttacgacacggcggaccacacgggaaacttcaagaagtacggatcttcacacaaggaacacgcagaagatgctggacagtactccaagggaggtcataaggaggagggacattctgagaagaaacagtccaaaaagggacattcggaagatgggaagtacgacagcgatcaccacgagtacaagaagcaacgaggagacagcaagcagtatcgggatcgggaagagttctccctaaaggatggcaaatctggcagtaatgtgcacggctacaaaatttatcatcagtga

SEQ ID NO: 257 - DNA, 567 bp, Culex quinquefasciatus
atgactgaccacgaccgcggagacggtgaagaggagttgttcggtggctcatccggtcaagaagttactgtgcacgttgatgtcgctgatgtctggttgcgtttcgccaaattgcgaaccgcggtgaccagtctggaactttatggcacccacagcggggggactggacaagaggtgcctcccaatccatctcctccttcaacttgtagcgcatttggccgaggtcgtcgggcaccagaacgcgctgtcccgttgcacgacaggctggaccgtcacccgagcgatggccggaacggatcgttcgatgagcgaacaaaatcgcttttgggcggtgtgagatttctgcaattgccaaaccagtgcagagccgtcaataagaatcatgacaagaaacaagaaacaagaaacaagaaacaagaaacaagaaacaagaaacaagaaacaagaaacaagaaacaagaaacaagaaacaagaaacaagaaacaagaaacaagaaacaagaaacaagaaacaagaaacaagaaacaagaaacaagaaacaagaaacaagaaacaagaaacaataa

SEQ ID NO: 258 - DNA, 504 bp, Culex quinquefasciatus
atgcacaatgtcagggaggagagaaaggggaaaacggcttgcggattagcatggataatatggggttggtgccaggttgagaagccagagtccagaagccagaagccagaagccagagtccagaagcccgaagccagaagccagagtccagattccagaagccagagtccagaagccagaagccagagtccagaagccagagtccagaagccagaagccagagtccagaagccatattctagaagccagattctagaagccagagtccagaagccagagtccagaagccagattctagaagccagagtccagaagccagaagccagagtccagattccagaagccagagtccagagtccagaagccagagtccagaagccagagtccagaagccagagtccagaagcccgaagccagaagccagagtccagagtccagaagccagagtccagagtccagagtccagaagccagagtcggtatccgcacataccgagtcagctga

SEQ ID NO: 259 - DNA, 2199 bp, Anopheles gambiae
atggttcaacgctggaacgactccgggcatctgtatctggacggtgcagggaagcattgtttacaccgggacgtagtgtcccgccttgccatccatcagctcgaagcggtccgttttctgtacgcgcagctacaagagtacaccggaatattcttgaacgatgaatcaggcctcggcaagtgctatcagacggtcgccttcctgtcggccctcccggtagcgggcgaggatcgttcgctgatactgtgcccaaccccggaccgcatacaccactggacgtaccatctggatgcgctggcaccctcgctgcgccctagcgtgcacccgaagtcttatctcgacgcgacggcagaacagtccgccctgcggggcaccgactggcagtacgtggtggtggacgaaacgcgcgaatttatgaccgaacggcagctggaaacgctgcgctcgctggccgtgaaacggtacatcttcgtcagctccgtggacctgctcgaccggttggatgtgttgcaaaggcggcttgatttctgctacccgcgcgatacctcccacctgagagccgtgctggagcagcagcaaaagcgacgtacaaagaggggcatatttaaggtttacctgtgcacgagacggttcgtgttgcggagacacgtgcgcaactatcgtcggctgctgccactcatcggtagggaaacgtttctggaacgctttggtgtgtggtgtgtggcaaacaatgtggaaaccatcgtggaagagacaccacagctgaaacccgtagaagaacgcatcgaaccaacgcgcgcaaacgaagaagatctcctgacagtttcaccgcttacccgagcaatgacaccggaagcggtcacagtgaattcagcgcgtacgaacgaagaagatctgctggcagttccactgctaacccgagcgatggcatcggaaaccacagccgatcacagtccggtgggggagaatgaggcggtcccaatccactttgccggcagcgaaccactctttgagccgaacgaaaccaacacagaactgatgccggtgttgcgcgtcgactcggacacaccctcggaagggaactctaccatcccggagacggcacccgattccgagggttacgtgcagttcgggcaggagctgtccagcaatgggttggcatcgtcccagcgctcccagccagccgcattcgcgaccgaacggtaccggttcccgttcgaaaagttcctccgcagccagcagggagcgattcgctcgtccaactcatccgttagcgtcgaaagcataccgaacgggcagccacagcagcagcagccgatcgtgatcagctcgtccgattcaccgccgcgtgccaaatcgcccccgctgttcgaagattccgatcacgacacgcgatcgctccactcggacactgccttctccgacgatgacgacctgtcgctgatggaactgttggcaaactcgcgctcatcggcaccgctcgggaagtcggggcgacccccatcgcctagtatcgccctgcgaagaccatcctccttcagtacgcccataacgaagctaatgtttgggcagctggcagatgggcaaagctcacagccggacggaacgggcaatctctcctcgatggacatttttgcggaatcgatcgtacaggcggagggagaaaatgtgtttgaaataacgaaaaacaatgcctttcccaatcggatcgtggtgcgcggggaggaggaagggatgccctcgctaacgctggtggatgattccagcgacgatgatgatgtgcagattgtggaggaaagctgcgagcgtgtcattagtctgacggaggaaccggtcggtacaccgaccagggcggacaagctgaactgtgccgtggtatgccaaacgacaccgccgagtgggaaaggagccgccggggcgaattctgcgctctcacccggtcggggatggttgggcaaacggctacaaacgtcagcgtcggtttcgccggccagtggcaagaacacacccaccacaagccgatcgacaccgaagggtggcagtgctgggagcagctgctccaaaccgttagctcacattgtaagggatgcgaagcggaggagaaagttggacgaactgtttcaaattgtcgacgataagccggagggcggtaggcgcagtagccggcgaatgcgaggatcgagggtaggatcgcgatga

SEQ ID NO: 260 - DNA, 939 bp, Anopheles gambiae
atgcaaatccaaagtgttgctttggtttgtgcgtgtttagtgcttgcctcagtgagtgctgccccacgtgtacaacggtcagcgaatgaagctgcatcgagctacttctacttcagccgttcaccaggacattcgcttgagcttggcacaccatttgatgggttgtcggtgattccaacactaccggaactgaaatctttcccctcagtgcacatccatcacgacgaaggggatgatcatcatgggaaagctttgctagagagcagtgatgaggatggagatgaggatgatcatgcagcgtaccgagtggtggagcacggccacgaagaggaaggtggctcagcgtacgacgaggatcatcacgcaaagaagggtgacaagtcggagaaaggatacgacaagaagcacgcgctagaacacggcagcaagggatcgtatggaaaggaggatcacaagcaacactacgcgcacggtggggatcgcaagcatgcgcatcacgatgaagcctcccactacaacgatcatcacgcggaggcaaagcgtaccaagggtggcaagcatcacgagaaaaagcaccacaagaagggttcgaaaacgacgggctatcacaacgtgtatcacaaggatgagtacaagaaggagcacatcttctacgatacgagcgatcacagcgggcagtttaagaagtacggttcgtcgcacgagcaacactccaacgaggccggacagcacgcgaagggtggccacgaggatcacgctcaccgggaaagtgcacacaagaaggcgggcagcaaggagcacggttcgtacgataagcatcatggggagttcgcgaacgggcagggacaggaggagcatcatcatgacgtttccagctacgaccgcaagcacggccacagcgggctgggcgaacggggctacaagattattcacccttag

SEQ ID NO: 261 - DNA, 10656 bp, Anopheles gambiae
gtcgcgatgccactggagtcgatggcaaccgtcagctcatcgacggtgaacaacagcagttcgttccagcagtcgtcatcgtcgtcctcctcgacgacctcgaaggtccagtccagtgcagtggaaagtacagtgcagcgcaagtcctccgatgggcgcgtgatcagtgaagtgcgtgagcaaggctccaagaaggatgggccaaagttcagcaccatcgagatctcgaaaatggccctagacagcagtgccgtttcgagcagtagcaccagcaaagtcatgcaaagtagcagcagtgccataacgaagcaagagcagcagcaatcatcatcattgtcatcttcatcgcagagtgcgatgcatagtgagaaaaatgtgtccgaatctagtgcaatctccagttcacacaattccgctggaacggccaagcttcaccagacggcgaacaaccagaatcaagtgctgtacgatacagccggcaaccggatcacgaccaccggctcctcatcgtatcaagcggcgcaaggttacagttcctcgtccttccagagctccgaagcgatggattcaaagtcatcgaatgactacatgtcctctaccagtacatccacgaagcagagtcacaatgtgtccacttccaagggtatgacgtccagcagcgcaaaggactctatcatcgactcaaccacactggacaactactcggtgcagttgcacgattcgtccaccggtcagcaacactctaacaatatgctcatgaaaacggagtcggcccacaccgtggccagcctttcgtcggcacacgacggactggccagtacgatccagagcacgcagctcattacggaatcggcgagcgaggcgcagcagcgccagcaacactcggagtcgaccaaaacgtacgaaacgtcctcgcactatgcgcagatggacgaggaaagccgttcccggcgcaagacgtccgagtatcgcgagcagcgcgaatcgaatgccgccatcctgaagcgcaagatctatgacgagcacgggcggcggctgaacttgatcgatgagaaaattgtgccgaaagacatcgtgacggcggacctgcaggacgacgtgacgaacgtgaccaaaacgtcgttcgaggcgaaactgttcaacccgaagctgaagcgatgggagctggtcgaccagaagacgatactggagaaggacattaccaccgacataccggtggagatcgtccaggagctggaggtggagcgtcccgagctggccaacatcaccacgacgattcagatgacgaaggtatacgatgccaagaccaagcagtggaaaacgatcgatcagaagaagcacatcgatgtgctggaaaagatcaccttcctggaggaaagctccggacgctcggagctggacgagtcggagcgaacgaaaaacatgaaatccatggatatggtgctgcattttgtactcgcatttgttctttcgcaggaccgtgtgacaatcaaggaggtgagcgatctaagcgatcagaaacgaaaccagatcaacaaaacgtccaaacgcacagaccaacaaaccatccaggagcagtgcatctgcgaaatctgtacctgcggactcacgtggacgaaggatgatttggaaaaggttgatgtcacgaaccttaaagctgactacgtgcgaccaaaaccaatcaagcatgaagataatctcaagcccgaaggagcatttacggtgccggaacgagcaggatacaccccaggggagcgtgtcaagccgataaaacctgatgacaaccttcgtccagagggcgatttctctactccagagaagcttcagtacagaccggccgagcgaccaaagcaggttcgacctgaggataacctcagaccggaaggagacttcgagaagcctgagaagcctcagtacagaccggccgagcgtccgaaacagataaaacctgaggataacctgcgtactgagggagagttccaggctcctgagcgtccagagtatcgtcctggagagcgaccgaagcctgtgcgtcacgatgataatcttcgtcccgagggagacttcgagcgtcccgagaaatctccattccgaccagccgagcgaccgaagcaggttcgtcctgaggacaatcttcgtccagagggcgagttctctactccagagaagcctcagtacagaccggccgagcgaccgaagcagattcgacctgaggataacctcagaccggaaggagagttcgagaagcctgagaagcctcagtacagaccggccgagcgtccgaagcagatcaaacctgaagataacctgcgtactgagggagagttccaggctcctgagcgtccagagtatcgtcctggagagcgtccgaagcctgttcgtcacgatgataatcttcgtcccgagggagacttcgagcgtcccgagaaatctccattccgaccagccgagcgaccgaagcaggttcgtcctgaggacaatcttcgtccagagggcgatttctctactccagagaagcctcagtatagaccggccgagcgaccgaagcaggttcgacctgaggataacctcagaccggaaggagacttcgagaagcctgagaagcctcagtacagaccggccgagcgtccgaaacagatcaaacctgaggataatctgcatactgagggagagttccaggctcctgagcgtccagagtatcgtcctggggaacgaccgaagcctgtgcgtcacgatgataatcttcgtcccgagggagacttcgagcgtcccgagaaatctccattccgaccagccgagcgaccgaagcaggttcgtcctgaggacaatcttcgtccagagggcgatttctctactccagagaagcctcagtacagaccggccgagcgtccaaaacaggttcgtcctcaagataacctcaagcccgaaggtgatttcgaacgacctcagcctacgattgtaggaaaggccgagagagctcagattgttcgtcacgaggacaatctgtatatggaaggcaacttcgaacgtactgagaaaacggtttacatatctggcgagcgaccgaagcccataagacctgatgataatcttcgtcccgagggagacttcgagcgccccgagaaatcaccattccgaccagccgagcgaccgaagcaggttcgtcctgaggacaatctacgtccagagggcgagttttctaccccagagaagcctcagtacagaccggccgagcgaccgaagcaggttcgacctgaggataaccttagaccggaaggagacttcgagaagcctgagaagcctcagtacagaccggccgagcgtccgaagcagattaaacctgaggataatctgcgtactgagggagagttccagactcctgagcgtccagagtatcgtcctggagagcgaccgaagcccataagacctgatgataatcttcgtcctgaaggagacttcgagcgtcccgagaaatcaccattccgaccagccgagcgaccgaagcaggttcgtcctgaggataaccttcgtccagagggcgagttttctactccagagaagcctcagtacaaatcggccgagcgaccgaagcaggttcgtcctcaagataacctcagaccggaaggagacttcgagaagcctgagaagcctcagtacagaccggccgagcgtccgaagcagatcaaacctgaggataacctgcgtactgagggagagttccaggctcctgagcgtccagagtatcgtcctggggaacgaccgaagcctgtgcgtcacgatgataatcttcgtcccgagggagacttcgagcgtcccgagaaatcaccattccgaccagccgagcgaccgaagcaggttcgtcctgaggacaatcttcgtccagagggcgatttctctactccagagaagcctcagtatagaccggccgagcgtccgaagcaagttcgtcctcaagataacctcaagcccgaaggtgatttcgaacgacctcagcctacgattgtaggaaaggccgagagagctcagattgttcgtcacgaggacaatctgtacatggaaggcaacttcgaacgtactgagaaaacggtttacatatctggcgagcgaccgaagcccataagacctgatgataatcttcgtcccgagggagacttcgagcgtcccgagaaatcaccattccgaccagccgagcgaccgaagcaggttcgtcctgaggacaatcttcgtccagagggcgagttctctactccagagaagcctcagtacagaccggccgagcgaccgaagcaggttcgacctgaggataatctcagaccggaaggagacttcgagaagcctgagaagcctcagtacagaccggccgagcgtccgaagcagataaaacctgaagataacctgcgtactgaaggagagttccagactcctgagcgtccagagtatcgtcctggagagcgaccgaagcccataagacctgatgataatcttcgtcctgaaggagacttcgagcgtcccgagaaatctccattccgaccagccgagcgaccgaagcaggttcgtcctgaggacaatcttcgtccagagggcgatttctctactccagagaagcctcagtacaaatcggccgagcgaccgaagcaggttcgtcctcaagataacctcagaccggaaggagagttcgagaagcctgagaagcctcagtacagaccggccgagcgtccgaagcagatcaaacctgaggataatctgcgtactgagggagagttccagactcctgagcgtccagagtatcgtcctggagagcgaccgaagcccataagacctgatgataatcttcgtcctgaaggagacttcgagcgtcccgagaaatctccattccgaccagccgagcgaccgaagcaggttcgtcctgaggataaccttcgtcccgagggcgagttttctactccagagaagcctcagtatagaccggccgagcgaccgaagcaggttcgacctgaggataacctcagaccggaaggagagttcgagaagcctgagaagcctcagtacagaccggccgagcgtccgaagcagatcaaacctgaagataacctgcgtactgagggagagttccaggctcctgagcgtccagagtatcgtcctggggaacgaccgaagcctgtgcgtcacgatgataatcttcgtcccgagggagacttcgagcgtcccgagaaatctccattccgaccagccgagcgaccgaagcaggttcgtcctgaggacaatcttcgtccagagggcgatttctctactccagagaagcctcagtatagaccggccgagcgtccgaagcaagttcgtcctcaagataacctcaagcccgaaggtgatttcgaacgacctcagcctacgattgtaggaaaggccgagagagctcagattgttcgtcacgaggacaatctgtacatggaaggcaacttcgaacgtactgagaaaacggtttacatatctggcgagcgaccgaagcccataagacctgatgataatcttcgtcccgagggagacttcgagcgtcccgagaaatcaccattccgaccagccgagcgaccgaagcaggttcgtcctgaggacaatcttcgtccagagggcgagttctctactccagagaagcctcagtacagaccggccgagcgtccgaagcaggttcgacctgaggataacctcagaccggaaggagacttcgagaagcctgagaagcctcagtacagaccggccgagcgtccgaagcagatcaaacctgaggataatctgcgtactgagggagagttccaggctcctgagcgtccagagtatcgtcctggagagcgaccgaagcctgtgcgtcacgatgataatcttcgtcccgagggagacttcgagcgtcccgagaaatcaccattccgaccagccgagcgaccgaagcaggttcgtcctgaggacaatcttcgtccagagggcgatttctctactccagagaagcctcagtacagaccggccgagcgtccaaaacaggttcgtcctcacgataacctcaagcccgaaggtgatttcgaacgacctcagcctacgattgtaggaaaggccgagagagctcagattgttcgtcacgaggacaatctgtacatggaaggcaacttcgaacgtactgagaaaacggtttacatatctggcgagcgaccgaagcccataagacctgatgataatcttcgtcccgagggagacttcgagcgtcccgagaaatcaccattccgaccagccgagcgaccgaagcaggttcgtcctgaggacaatcttcgttcagagggcgagttttctactccagagaagcctcagtacagaccggccgagcgtccgaagcaggttcgacctgaggataacctcagaccggaaggagacttcgagaagcctgagaagcctcagtacagaccggccgagcgtccgaagcagatcaaacctgaggataatctgcgcactgagggagagttccaggctcctgagcgtccagagtatcgtcctggagagcgaccgaagcctgtgcgtcacgatgataatcttcgtcccgagggagacttcgagcgtcccgagaaatcaccattccgaccagccgagcgaccgaagcaggttcgtcctgaggacaatcttcgtccagagggcgagttctctactccagagaagcctcagtacagaccggccgagcgtccgaagcaggttcgacctgaggataacctcagaccggaaggagacttcgagaagcctgagaagcctcagtacagaccggccgagcgtccgaagcagatcaaacctgaggataatctgcgcactgagggagagttccaggctcctgagcgtccagagtatcgtcctggggagcgaccgaagcctgtgcgtcacgatgataatcttcgtcccgagggagacttcgagcgtcccgagaaatctccattccgaccagccgagcgaccgaagcaggttcgtcctgaggacaatcttcgtccagagggcgatttctctactccagagaagcctcagtatagaccggccgagcgtccgaagcaagttcgtcctcaagataacctcaagcccgaaggtgatttcgaacgacctcagcctacgattgtaggaaaggccgagagagctcagattgttcgtcacgaggacaatctgtacatggaaggcaacttcgaacgtactgagaaaacggtttacatatctggcgagcgaccgaagcccataagacctgatgataatcttcgtcccgagggagacttcgagcgtcccgagaaatcaccattccgaccagccgagcgaccgaagcaggttcgtcctgaggacaatcttcgtccagagggcgagttctctactccagagaagcctcagtacagaccggccgagcgtccgaagcaggttcgacctgaggataacctcagaccggaaggagacttcgagaagcctgagaagcctcagtacagaccggccgagcgtcccgaagcaaaacctgaggataatctgcgcactgagggagagttccagactcctgagcgtccagagtatcgtcctggagagcgaccgaagcctgtgcgtcacgatgataatcttcgtcccgagggagacttcgagcgtcccgagaaatcaccattccgaccagccgagcgaccgaagcaggttcgtcctgaggacaatcttcgtccagagggcgagttctctactccagagaagcctcagtacagaccggccgagcgtccgaagcaggttcgacctgaggataacctcagaccggaaggagacttcgagaagcctgagaagcctcagtacagaccggccgagcgtccgaagcagatcaaacctgaggataatctgcgcactgagggagagttccaggctcctgagcgtccagagtatcgtcctggagagcgaccgaagcctgtgcgtcacgatgataatcttcgtcccgagggagacttcgagcgtcccgagaaatcaccattccgaccagccgagcgaccgaagcaggttcgtcctgaggacaatcttcgtccagagggcgagttctctactccagagaagcctcagtacagaccggccgagcgtccgaagcaggttcgacctgaggataacctcagaccggaaggagacttcgagaagcctgagaagcctcagtacagaccggccgagcgtccgaagcagatcaaacctgaggataacctgcgtactgagggagagttccagactcctgagcgtccagagtatcgtcctggagagcgaccgaagcctgtgcgtcacgatgataatcttcgtcccgagggagacttcgagcgtcccgagaaatcaccattccgaccagccgagcgaccgaagcaggttcgaccggaagataaccttaaaccagagggaagttttgaaaaaccagagaagcatcagtacagaccggcagaaagaccgaagcaagtgaaacctctggacaatcttaggccagaaggagacttcgaacgcccgaaaccaacaccaattggtaaacccgatcgtgcccagatcgtgaagcatgaggataacttgcgagtcgaaggaaactttgaaagagtagaaaaaacagtatttgtagctggcgaacgtccaaaaccgataaagcctgatgataatctacgcccagaaggagattttatgactccggaaaaacaacagttccgtccggccgagcgtccgaaacagatcaaacctcaggacaatctgcgccccgaaggagacttcgaacgtccacaaaagtccccgatcggccctggtgaacgtcccaaaccgatcagacacgatgacaatctacgaccggagggatcattcgaaagaccagaaaaggctacgttcaaaccagcggaacggcccaaacaaatacgcccggaggataatttgcgtaccgagggtgagtttgagaagcccgaaaagccacagttccggccggccgagcgtccgaagcaggtgaaaccgcaggataatctgcaaatcgagggagactacaacacgttcaaggagtacacggaacagaagcagcgcaaggaagccatactaaaggaggtgcatgaaccgggcatcgccgacggtgcggtactggtgaccacgcaaacgcagcaacaccataccagtgagcaggtctctagttctactgccatcaatcgagcgcagcgcattgaagctagcaccaacgaacgcgatcaaacaacctcgcaacgatctgcgacgaaacattcgcaatcgattcatgacgtttcgggccgaaatgttgccgaatcgattaccaatcacagccagcatcacgtggttaatggcaaaacggttatggcggaaacacaggtgaagaaactgatcggtggaaaatgggtcaccaagacgatcaaaacggaaagcaagtcattcgctcaggatcatcatcaacatggagcagtgcacggcgatagtaagatggtgcattcggatcacgtggcacgtcagcagcatcagacgcagagtgccggtacggaaatgcactctcactccatatccacctccagctcgtcggttagcaaatctcaatcgagcagtacgatcgtgagcgataagaccgtacaacggggagtgcgtgaaacgaccgtgtctgccggttcgccttctggccgccctgcagcaggagcacgtggaggctctagcattgtgttgggtgagtccaccattgatagtagctcttccaagcgacagcagacaagcaccaccaccaagctgattggaggaaagctcgtccacgtgacaaacgccagcgatagcaataacaacagttccgccggcaaagcgtctgcccagaacgcatcgaatgctcaccactcttcgctgcaggagcagctgtcctcccagaccgcgtcctccacatccacagcctcgaacgtgatgaagtcgagccgaacgagtgaatcaagcaccacccgcaacacgagcacgatcggacagcagtcctccacgtcacagcagcagcagcagcagcagtacaatcggaagaacaccttcgcgtcgtcagagaacgtgaacaactcgatcctctgccgaccggcgcaaacgtccaccgccaccacaacgcagcacgccgccaatggggtggccggtggcatgagcgtatccggctcgatccagcgcaagagcatctcgaacctgaacgacagcgccatgtactcgacgacgaaccgcaccagctacagctcgctgcaccgccgcggcaaggaatcggccgaatcgagaatgcaggactacgtgaagacgctcgaaacgggaaccatcaccaaccggacggtgcgtggccaaccgtgtccaccaccgacgctggccggtacgggtctatcgaacagcagtagcaccgtgaccgcgagctcctccaccagtatgtcggcggcgaatcagaaatcgctgcgagactaccactccgccatgaacgtcacgcgcagctcgtcgaccaaagcgaacgcgtccaacatctcgttcggggacgacaagttccacggtaccagctcgtacaaggtgcagtacatccagcagcacgaagggcgctgcccggccgccgcacacgacaacatgaagctgtcgaaggtcaccaaacagcacacgtactatgtgcgggacaagaagtag

SEQ ID NO: 262 - DNA, 2838 bp, Anopheles gambiae
cggatcggatcggatcggatcggatcgaacaggaacgatgcggttcctaacgcaacgggacaaccccgaacgtgacagccgtacattgcaacagacacgaccgaatctctgggtagcatttggagctctcgctcgtgtaggacgctccgcgttgggtccttttacgaaggtccacgtcaactacgtctcactgaacgctagagcatttgttgaattcactagtcgtgataccgcccgtgtctcgtatcccttatagagagatatatagagatagatatagagatagatagcaacctgctgccaccactaagtacctcgcgaactagccccaagctcgtttgggaaaacttccaaagaccatcgtcctgtcgtctcgctaagtcaacctttgccatcgagatgtgtgcgtgcagttccagcaggatgatgcagcaaccgttgaacaacaacagcaaaacacgcaaccgcaacattgaaacaacaccactacttccacctcgaacgaatgtaccgtgcaccttacgtatctctctcgctcgctcgccctctttcacatataccagtgcaatattacaccctcttcccccacccccactcatgcagcaaactaccacgcgcactatcgctaacacaaaaatggaatcgcaggatggttctgccgccgttaccaccagaactatagttacaaccaagaccgttgcctcgagtgctcccaagccgatgtcaccttttgccaagttccggcagctcgacaagcaaaactcgctctcatcgcaatcacctcctaactcccctaagacaccgtccactccgacgactccgtccggcgcgatgggtggtccgatgtttaagtttaccgatcccgcattgaatcgtcgcgccgcaactgttaaggatcaactgttgcagtggtgccagatgaagacgaaggaatacgagaacgttaaaatagaaaacttctccaccagctggtcagatggaatggcattctgtgcgctgattcaccatttcctgccggatgcttttgattttagcaaactaacaccacagcagcgtcgccataatttcaccctcgccttccgagtggctgatgaaaaagccgggatcgcgcccctactggatgtggatgatatggttgccatgcgaaagcctgactggaaatgtgtcttcacttacgtgcagtccatttatcgacgtttcaaaaacgaaatctaaagcgaacatacaaacacacaagcacactctcagactaaaaggatgctgattgagcggagcatattgcacatgaaaaagatattactttgaagaaaataccgcaacctaatgcgacacgggcaacacgggcgtcaaacggaaagtggttgtgattgttaaaggttttgttttttttctcctgctcttatttatttaaatctgtttattttgtttactgtttttgtttcacaacgtttgctttgccgcattaggctgcccgggttttatttccggaatttgtttttaaattttccattacttaaaaaaacaacaacacgcaaaatgcaaagtgcgcacatttccatccttctacttgcccaacacaaccccctttaatacactgggaggattctgcgggtggtcatgaaaagaaaaacccgaagtggagactcccgcaccccgtatctttcgcttggaagggaaaatgtcgaacgtttcccatcatttcgtagctaattgttttgtgttgcggccctgaacagaggtcgattcttttgcttccgttcgtcgaagttaaaccgaatcagacacacatatagacacacaccgatccattaaaagagtgaagattccatctgaatccacggttagaagtttcttattgctacttgacataatcacacaaaatacatattttactctctaaaagaggttttatcgcagggtaattgggttcgttttcgcttttgcttaaattttgccccacgcacgtatatttgcgtccgagttcgtgaatctggacagagatgtttatttcgatcgaagattgacatagcgagtcgggcgtactagcgcaggttagtcggcaatggcgagacagggcagcacctctaataaagatatcgattaggttgttcattcgctctagtcccagaaacaacaaaaaaaaatttaaaaaatgaaaactttgagagcgagttctatgaacaaaaggtaaaactatgtaaaacacagaagcgagacgaaagaagttaggattggtcgataaaagaggaatgtgtttttttgtatttattcttacaaaaagatgatatatatatatttgttttttcgtgtttatccttattatgctctcatgattaatgttagtatgcatatattaaactttttttgaagaaccacttattaagagtcaaacgcgtttgttcgatgaaatcatcgttatcgttaaatacatgccttaaacacgcttcattgttacagctaccgtgttctcctagttgatcccctctctgaaacgggaatcttttcttcgggaggcacgattctttcacattctcagcgtttattgtactgcttcttgcccattgtaaacctggatcaagtggaacaggaaattaaattgtaagatacacaagtgaagaatattgcgagtaaggataaatcctgattgatgatgaaaaacagaaacgggaaatagtgatactgcaaatattgttgagataacgaaggggtcaagaaatggaaagcaaccatcgtatcctggttttggtttttatatcgcaaaatattgagatcgagagaacgggatagaagaccgatgaagagcgatatgtagtactgagatgatattactttgaacat

SEQ ID NO: 263 - DNA, 1596 bp, Anopheles gambiae
gcctatctcttcagacattggagaaaagagtacaagacatcacacaagagctcttgcaaacattcagggacaatgggattgaagttgaaatggtttcggcgaaggataaccttcgacggtgtgccaccggcaccggaaagagacattcgccgaaaggaggcaacggccggaacagtgattggggtgtaccgccaaagcacacactttgaggactttatcgagccagttcgttcgtcctactgggaaccgcctccgcaagcaatcgcccgtgccagtaagcccgtttcaatgaccaatgtcgccgccgaagctgatagccgtgataagatagcaccacacactccagtcgaccgtttgccgcagcttagtgctgacgactacgagatgccgcccgagccgaactatgccgccccgaagccgccggtaaggaagggagtttccaaggcaaagtcgctgatgaaccttgccaactccctggaggacgcaaacggacttgaaaagagacagcaagaagtgctgcagcagcacgagctacgatcaccacaatcggtggaggtgacgacttccagtaactcgctcccactgcgtgaggatgctccgagtcctgtaaaacgagaagttagcacagagcctgaatacatagtgccgctcgctgctgaggaaccgttcgaggaaccaatctatgactcattcgaagccatcttcgaacgagtgaaagctcgcaaaccgatcagtcctgcttcggaacggtccaacatctcggcaagacctgaaacatcatctcctctacctaaccgagaacctgcgcagacgagtccgcaagatgatggcgtgatatttgagcgtgtaaagcttcgcaactctacgccacctgactcgctgagatctagcacgactggttcgctatcatctgcaagctctccctcacctccgccacagcgaaaaccggtgctacaggtcaccaccggcgcatccagcccaccaccgccaacatctcctccccagcccaaatcaatcctcaagaaacgagctccaccaccgccacagatcccagtcgaggccacatccagcatggttgagttttccaacgaaatagtcacagcgatcccaacccctccaccgcgctccatccgagcgactaccctgaaagatgctccggaaccctcgccacctgtcacaccaccagaacgaaagcaagaacctccggcgcgtccagaaacttccatgaaaattacgaacggaaacgaccacgaatccgattccgactcggacgatgacttcaactgggactttgtgcagaagcaccgctccagcatcaatcaaacggtggccgcacaaacacagatcgaccccgaggtgctacggaatgctcccgcctcactgcggagtggcatggtgcagtcggtggcagctgtgccgtcaccgcgcaacctgcccgaaccgatcgcacagccccggacgcttcgtggcatgcgaaatcagcgggctcacgcacagctggaaagcagcggcaggcagcaggacgcgccggcagtacaaattccaccaccaagggcacgtgccagtgactcaaacgcgtcggaaacttccgcttag

SEQ ID NO: 264 - DNA, 1560 bp, Anopheles gambiae
atggttagtgaggctgcaattaaagcggaatgggattatcgattgaaagccgttaaactggtagcctcgctgctgctgctgctcgcggtagccgtccttgccagcaaagatgccagcgggaaaccggtcgacggtgtggccagcacgcccagcaagccgccgccgcctccacagctccacccatccgggccgtccaagccgccgaccaccgtaacgaagaaagcatcctcacacggtaagcgcgaggtggccagcgcctacggactgccgcactaccagccgtcccaccatcgctactcgttcgctggccatgcgcagccgctcggcgagttttacgcacctccggccaccagccacggctcgtacagctacagcatcccgcagcattcgcccttcccgcccatgcacggttcgttcggtggccacaagctttacctcggtccggcgccatccctcaccaccagctacaagtacacgccggcctcttcgcacgcgttcttcgcaccggcagtcgggcagggccaccagttcgccggtgggttcggcggtcccgaaccgacccacttcaagtacggcagcagcttcggctcgaaggagctatccgatctgctgaaacagctgcactcggtcgggccgctcacgatcaaggccatcccggcgagttacgcgtacggatcaccgttccccgagcatgacgctggccaccctagcccctcggtcgtgctcgatagcagcgctttccatctgaaaccgatgccactgaagtttcacccggaggtggccagcttcgcccatggcgtgagccttccgcaagcggccgcccttacggcaccggccggtccaacgtcgacgtcttccacgtacggccacttggcacactcgctcgggcacgaaccgtcgtacgcgagcggtgtgaaggggctgcgccattactccagcagcccaaacgtccccgccaacgatctgtactcgggcaacaagtacatctccacgctgaatctacaccagcccacgacggccacgatggtgtcgcccctgcacacctccgtccactctacggtcggaggcggaggcgccggtagcggcagtgcgcaccagaagcccttcaaaccgtccacctaccttggctcgacgcacgaaaccatctcggcgccctccacctcgcacaccggcgcgtatctggcgccctcgctgcagtacctgcccccggtcagcaaaggggcaccgttcccgcccaagctcagctacgactcgccggccaagcatggctatctgccaccagctcccccgtccaccaacgcgtaccttcccccgccaccaaaaccggcccacggatatctgccacccgtgccgagctcgaactaccttccactctctgcatcttctgcaccgtccggatcgcacgaagacaccggccggaagccgtcaggacagcagcagcaccatcatcacatccaccacggcagcgaacagtcgagcgaaagtctcgagtacagtggagcgaccgccgccgtccctacgccaacggccgtgacagcgtcgcaccactggaagcactag

SEQ ID NO: 265 - DNA, 10916 bp, Anopheles gambiae
tggcaacaggcggaggacttttcgcgcaagaaagaaatccgggcgtatatgtacaagttgcgcgagcagcggttgaaggatttttacgccagcaacgacagcagtccgccctacttcctgatggataatgcgagcgcaacgttcggcctgaagaagagcacagtgacgggcagccatggcgactcgctcgtcgaccagagcttcgagagcttcaagacgaaggagatccgcgactcggaaagcccaaccagattcggcagcatggccctgccggcagacaacagcggctggcagatccgcacgtcggaggagatgagcgaggacggcaagacgcacacggtgcggacggccgccaccacccagggcacgaaggagatcgacggcggccggaccgcgttcgcgggccaaaacctcgagtcgcacagcgagcactttgacggcgacggcagcaactttgtgcacagcaagggcgaccagtccagcaccgtgctggtggaggacagtgtggtcgagggcgagcacgggcagcgcaccgtgtccgggtcgacccgctcgaccaccacctcggtcagctcgacgcgctcggtcgtctaccagcagcagaacggtggcgacacggctagccggccggccaccgacggggtggaccgcggcacggaccgtccgctcgagttcagcgcggagcatttcagcaacgcgaccgccaccgcggccagcagcacagagtcgcgcaccgccagcgagcagcagcgcgacgagcgggccgcaccgaaggagctgtccaaggatcccgagcgcgtgcgggaagcgttccggctggcgcagggctccggccggatagtggagcgcgaggaaacgatggtaaacacgaccaccaagatgatcaccgagacgaagcagctagacgacgggacgaccgtgacgacgcgcacgtacgaaaagatcgccccgccggccgagggagtccgcgcgagcgagagcagcgagcgggaccgcttcacgtccaccgccaaggtggcggtggtgcagcaggaaggcgtgggccgagccgtggaccgcccaaccgccgctgcggcgagctcgagcgagctcatacggcaggagaaggccaaccagtcgtcatcgtcgtcgtcggtgacaaagaccagcacgcagcagcgaatcatcgtggaggtggatgcggcgcacgactcgttcgcccgctcgctgcggtccgtgtcgccgacgggcagcgtgcgctcgatgcgctccaatgcgacgctgaccgggcgctcgagcaccagcccggaaaaggttcagccggcccgacccgagcccgacaccaaaccggactacatgcgctcaaccttcacctcggagcgtaaggtgtccggctttcaggaggagcagcagcagcagcagcagcagcagcaacgttcaccgagcccacgcaagatgtcgggcagtgtgccggccagctcgcgcgccacctcgccaacgaaagggtccagcgtggcggcgggccgtggacaggagcagccggcctgcgaccaccaggaggtggatggagcgaaggcacgcggcgcaccgaaaccgccgctggtgcgcagcgagacgtatgaggagcggtgccgcaagatactgggcatgccgaaccgcccggctgaggaggacggccgcaccgaggcgaagagcattttcagcacctacgacaacacggtgacggtgcagcagtcccgctcggagctgcgcgagcagcgcaaaaagatcgagcaggagatcaaatcgatggagagcaaaacgatgggcgcgctggcggacgagcgggacagtgtagtggcggaggtgtccgctggcagccgcaggatgtcaatcgccaaggaaccgtcccccacgcgcaaaatgtccgcccagcatggctctccgacgcgcaaaccgtccggtacggcgaaggacccgagctccagcgagctgaccaaggaacggtctccgagtcgtaaggctccgtcccgggacatttcgcccatcgcgaaggagaccccggcgcccgcaaagcagccgtcgaaggaagtgtctccggcgagaaaatcaccagccaaggatgcctccccagcacggtcgaccgccacgcccaaggacggctcaccggtacgaggtgcgccccagccggagcagccggccgggcgcaaggaagtgtcgcccgcgcgcaaggaacactccaccgaaacgacgcgcagcaaggctacgatactggtggagcaaaagcaggaggggcgcaacatctccgtcgccgagatcaccatcctgcccgtgctggaggtgtcgcacgaggccgtgcgcaccaagacgaccgcatcgcgcacccacgagaaggtgctcaccaagcagtcgtccgacacgaagttcgatcggcgcgcgacctcggtcgccaacagccgcgtcatcaccaacaaaagctcgtccgactttgacatcaagcggcgcgtggccgatctggccgcaccggacaagcggcgggcgcagccggccacgaccgccagcccggacaagcgacgggcggcgcaaccggcccagcagaagccgaaccacatcacggtggccaagatcaagatcgagtcgccgcgcaaaccgaccgccggcaaaccgcacccggcggaggaaccgaagccgaccggccggcagccgcaccgagcgcaggccgccgagccggaaacggaccccgaatcgagcaaggacaccggtctctcggacaacagcgaggtagaggagacggtggagagcgtgatcgagatgagcgtcaccgggacggcgtgctgccgccacacggatcgcaaggactcggccccggtgtaccgcacgacgggggcggcccggtcgggcaagagctacacccgctcgtccagtgacaaccatctgcgggcgacgagcgcgtcaacgcaccggcaccagccagcggtggcacgcgacggcagcaacgtgtccgcggccagcgcgacgctcaaatcggccgcaggcgggcgcaaggtggagcgcccggtcaagcacgtcgccaccaagacgatcaatctcgcgacgaaaccgaccgccggctcggacagcctcgacaacgtggtaatcgacatccagctggcgaaatcgtcccgcgagccgacgcccaacaagctcgtgccgataccggtgtcgcccgacacggaggacgcgggcaagccgcgctacccggacgcagtgcaggagccggacgacgaggcggccggtggtcggccggcccgcaaccagcgcgtcagcacgatccccatcttcgaggaggcgaccagcgagtacgtgggctgcgagatcaccgaggtggacgagcagcaggaagcgagcgcggcccagcaggccacccgcatcaccaacctggaccgcgtcaccgaggacgacgagtcgctgctgagcgtgacggagaaggtgaacaagtttgcgcaggaggcgcgccgcctgcaggccgacacgaatggggagagtcagcgcccgccgtcgatggggcgatttgccgcgcgccccgaatacgacgacctcgacgaccatctcaagtcggacgagtgtctgctgagcgtgtcggacaaggtgacgaagttcatctcgaccgccgaggaggtgaagaagatacgcacgtccggcccgttcgtgccgggcacggacgatggcccggtgaaggtggccgacggcgacgagtgtctgctgagcgtgaacgagaaggtcagccggttcgcgagccgcatgacgcgggcggtggacgcgcgcgacgatgcggaggaggatgagtccgaccagcagcagcgaaccgccgtacccggcgggttgggcgaatccgtgccgggcaagtttgtgccgcaaaggtcgccggagctggtgaagaacgcgatgcgcaccacggcccggcacctcgtggaggagcacgcgcccggcgacgagctggcccagtcggtgggcagcattgccagccggtaccgcaccgcgaccatggccaagccgtacgagaaggcaccggctggcggggcaccggccgccagcccgatcacgctgcgcagcaccgaggccgtcaagaaggcgaaggagctattcgagaagggacagacggacggcggacggcagcgcgacatcctcaacaggccctcggtgtgggaggagcggcgtaccagggcgcagccggcggccgagccgaagcgggccgacgtcaagctgacggatatcggtgtgacggagcgaaaggcccaaacggtgcgcgaggagcacgtggtcggggaggaatcggccccgcgcaagccgtccatcacgaaggtggagcagcagcggccggccgaaccggcggaggcagccaaaccgacaggatcggccggtggccgacgggacagcagtggcagtggcgtgcgtccgcccgcctacatccgcgatgtcgtgtccaccaagaaggatctgttcgaaaagcgcatctcctcgtccaagatgcaggtggagtacaccagccagacgtcgcaggaagcgaccgaaacgcaggccaccgcgacgcttcgcaagcagtcgctgaagcaggcaggggaagcggtgccgtctccatcaacgccggcgaaccggccgtctgcagatcagtcgaaaccgtcctacatgaaccacaccgtcgcgtcgctcgagcacatcaacgcgaaccagcgacgcgactcgctcgatcacggcccggccgcacatcacgaaacgacgacgacctcgacgatgatgacgacggcgacgacgacgacggcgtcggctcgcagtacgaccacgaccggcagcgccaagttcggcgtggagctgaaacgcctcgacacaaacggtcgcatggtggcgacgaatgctcccgcggtcagtagcgcaggctcaaagcgcaagccaagcacgggcgaggcacagccgaccgctgggtcgtcgcccgccattgaggagatctttgatctggagctgctcgagcgtatgctagagtcggtgacgggctacgagcagcggcgtcgcatacgcgcccagattcgcgtggtcaagaagcagaaagagcagcagcagcagcagcagcagcaaacgtctgccggcagccagacgcagaccaagcagacgagcgtaacaacctctaagagtgtcaccacgacgcgcgacactgcggccggcaagcgaaaggactcgagcccaacgcgtgcctcggtggtgctgggtggccgcaagcagtcggaaccggccgatgctaccgatgcggcggcacccaagcggcaggctagcatcgaagcggaaggtggccgaaaagccacagcaaacctaacagcgaagacgatgacaacggtgacaacggaacggtttgccagcaaggctggtacggccgatcgtgtaccacccaccacaaaggccgatgacaggcccatctgggcgacgagcaacatcctgaagaaggcgtctgagaacacgcgcaccttcaagagcgtgacgacgtcggcgagcagtgccggatgcgccaccggcggccgcaaggtcgtcagcacctcgtccagctaccaccagcagcagcagcagacgaaaacggcgacccaggacccgaagacgacgaccgactgcatcacctccagctacggcgtcgggccgacggacgagaacgggctgcccctgttcggcatacgggcgctgaagaagaaggcggcaccggcgccggctgacgatacggccaccaccacgaagatcagcggcaccgtcatcaccgagacgctggtcgccgagaacgggggtccggcggtaggcaaacgcagcaccacgcactacacgagcgagccgagcgcgttcggcgacgctgatggcgtcggcaagctgacggccgtgcgcaaaaccgaaacgatcgatgcggccggcacgcacgcggaagagttcgagatgctggacgggctagagctggcgggccgccgggaagcgaaggtggtccgcaagggctcggtaaaggagctgaccgagcgcttcatacaccgcgagtcgtccggctcgctgacgcaggacgcgacccgcacctacccgaaggcgggcctgatcctgcgctcctccgcccagcagagccagtcgagccgggcctcgaccccggccaccgacgggtgctccgtccggtccggctcggtcgacgggtacgaccaggaggaggaggaggcccatagcatgacgacgatgacgacgcgccaggtacgctcctttctgaacgacacgtccaaggtggtcgacgtgcgggacgtgctgcagcgaatgagcaacgcggacaatgtgacggagcagggtgattcggccgaggatcaggaggcaagggcactgctgaacaagtttctcggcgcttcagtgctgatgagcggcgtcgagtcgatggtttcctcgccgggcactatgctgggcgaagcgtctgccccgtccgccagtggtggcaccaaaaaggtaagtctggtgtccaaggtatcttcgacctcgaccaccacaaaaacggtcaaatcgtcgggcgtcactcccagtgctgccggctcaaaacaagccaccgttgacactctcgaggataactgggacgaagctgtgctgaagcagttgctggaatcaaccacgaactacgacgatcgacgcaaaatccgtgcccgtatccgtcaagtcatggctgaaaaagaagcgtgcgccgatatcgtcgccatcgtgacagccgatctgcagcgcgagcgccatctgcagcagcaacagccgtcggggacgatgggggccgctagcgctggcagtggtggcgcggccgaccgccaaaccgcagcgacggcagccgctgccaacggtctttcacagggtgagtcactgctgctgcccttgctgcaggggctgctgctgaacaatgcggccgccttcggctacaagggtactgccgcagtagtaggcgctagtggtagcggtgttagtggtggtagcgagggtgctggtggtagcagtagtagtagtagtagcaatggttacggtagtgctagtgtgaaggtgccaccggtcgaggattcgggcacggagtcgggcgaagacttgcggctgctggcagcggccgggctgcacgacatcggtaccgcgcactcggccccagcggccaccaccaacggggtggacagcgggctgcccaccatactgggcgaggtggcagcggcattgcagcggctgcagcagagcctgcaggccgacactgccggcccggcgccgaaggtgctgcagatcgatgcggaacagcggcgcgccctgctggccctgatcgcccgcctgcagcaggatctgcagcagccggacaagattgccgacctgcggctcgccggtgcgctcgacggtcggtgggaggcagcgcgagcggcaccgcccgatggcaccgcgcacgacgccggcactgccgggttggacgcgggccaagccgcccgggcccgtgccgccagttcaaggttcactgcgaagcggcggacgaaccgcaacagccggcacacggtgggcgttagtcgtgaggagcttgccgacgcgagaagattcatcgaggagatggtgaggatggacagccgccaccaagcggaccagtgcgtgacgtcaccggacaaggcgtacagcctgcagaagcagcagtcgctcggtgcggtgctgggccggccggaaccagacgtgcccccggcaggggatggggcagctgctgcggcaccggttcaggccaccgccacgccagcgaccgccttcgccatgaagcggcccagccagttcgtgccgaaggagatgcagaacgggcagacggcgctcgacaagcaggtgctgctacaggggcgcaccaagccggccaaagagaagctgctgctccgccagtcggtaagcgttgatcaggatctgccgcccgcgggcggacacgggacggcgagcgatcggcccgatgcgccgagcagcaaaccgatcgatctgcacaagcacaagccggccgaaaggcttccaaagcagcagcagcagcagcagcagcatcagcagcaggtggagctgccgttcaaaaaacccacgcaaaccgtcgcccagcgggcgctggtaaagaagtattccttcaacgacggctccagctcggacgaggatgtggcgcgccggggggccgcccgcaaaccgcaggacgaagcgggcaagacggcggaacagatggtgctgcgcaacaaaatcacgccggccgagccgacgagcgggccgggctcgatcgtggtcaacacggtgcagaaaatagtgagccgcgagacgaaaccggccgccggcagtccggcggtggcgcgccgccaccccctccagcacgggtgccgcacgcccgacgcgcccaaggacgatgcgagcgggcgcccgctgaacaagtacgccagcaagaagctgcgcatgaagcgggcgaacacgatcgatctgccgaaggtgctgccctcggcccagctcgacgacggcgaggatggccgggctgacccggcgcgggaaccggcgcggtcgcagcaagctaaccagcgggcggcgggcaagctgggaccggcgacagtgccgaccgtcgacgtgcccgactttaagccgcgcaccgagaacgatctcaagtttatggcgtttctgcagaagcaaaaccagcagtcgcgccaggtctggagcaagccgctgcgcgaaagccacggctcgaacaactggacgcacaagttcgaccacctgaagagcaactttgagcaggcggagcggcgcgatcggggcgagctgccgccgaagtacggtgccgcgccgaaaacgtccgcgatgagcttctggaagcaggcggaaagcagctcgttcgacgagacgccgagggccagtgggcggcaggccaaatccgtcacgccgaaccaaacgacgggcgtgaagcccggcacgggaagggtggcaagtgtgcccacgcagctgggtggcaagtacgcagggccaacggtggctgggcaggcggccagtgcgggtccatcgcccagcagcaacaccatcgtggaagggaagctggtgctgccgaaggcggtcgctgccagtgccggcaccacggtcaatcagttctcgcacgcgcccgcctccgcgttcaagccgatcccgcgcaagctgccgccggcgaacctcgagttcaagccgatcctggccgagccggacattgtgaagccgataccggcgcgcatctccgccaccgccaccgggctggtgaaacaaatcgtggcgaccgggttcaaggagacgcccgaggtgaagccggaaccgatgcacgtgcagctcgggctggtgcggtcgctcgccgcccaggggtaccaggagacgccgtacgtgccgctgccgaagctcgagcgcacgcccacacatcacgtgctcaactacaagccgcgcccggacggtgcggcgagcacgggcgagccagccccgcccgcaccctgggtcggcaagcggtccagcgagctggccgggccggccgggagccgcgtcgccagcattgccgcgaccaagttcaccgcgaactcgttcgggcacaacaagccggcgctgccggcgcagcaaccgctcgcctaccacggctcgctcaagtacgcggaaaagcccgccccgtaccagcacttccaggcgccgtacgagaagcgggcctccctgccggacgtgtccggggtgggccagcacggcacattcacctacaccgactacacgcagccggcgtccgtctcgaccttcacgctgaaccgtagcgactcgctgaccaatccggagaatgcgccgctcgtgctgaccagcaccaactccgtgtttagcccgacagcagcgccctctagccagccgccggcgcaacagcagcagcagcaaatcagctacctctccgtcgcggcaacggatcagcactcatcgccccactcgtccgccaacgcggaagaggacgaggacgaggagtttgacgacctggagtcgaccgattcgcaggagatgcgcgtcgtctcgaaggtgatgcaggcgccccagggccagcaggcgacgtacacggccgcccagcgacccacccacctgaacggtggctacgatccgaccggccgcggttcgctcatcgcccaaagcttgcagtcgtcgctgaaaaaagatcaaggacaaaagcccaacgccaccccgggcgcggcagcagccggcgcgccaaccgccgcagctcgaaatcacgcatcccacgccggtacagccggtctcgccctgctggcacgcaccaaatcgagccactcgctggccgtcccggtgcaccagcagtcccgcccgatcagcgccgagaagcagcgcaccgtggaggcgtacttcagcgggcagccgctcgccggccctccggcgggctacgcgatgacccgcgccgcctccaaccacaacctggtgatgcgcgacaagtcggccatggtggcgccgcccagcgcagtgcggcctgtttcgtacgcggcgggccacagcgcgggctactacaccggcggccagccgacagttcagcggcccgggtacgtggcacacgtggcgccaccgcagcgcccgagctatcgggacgagcccgtccactatcagccgattggcggtggactgctgagaagccgcaccatgccccacataccgctcggcagcttggccctgctcgacgagaacaacgtggaggacgcgttcgaggagctgatgaaccaatcgttcgccgtttaagccttgacgagactcaagtgcgttgaagattggacgcgaacaaaccgaatgtgtttgtgtgggtgcgtgtgtgtgtgttaatgttgttattgttgcgggcactggcactgattaagcattccacaaacacttccgcatacgaagaacacacacacacgcgcgctgcgagtattagtaaggagacctttggtgtggcgatg

SEQ ID NO: 266 - DNA, 4005 bp, Aedes aegypti
atggctccacttagcgttttacctacgactagcttcaaggattggccaagtcccgatattgcacgatcgctcacaggaccagacatactccagaaacattcaatcaactcactactgctggaacacaatgaaatcatcagcaggggcctgccgtcaccaattgaagaaaatgtgtcgttttcggatattttgggctcatcacaatcatcgcaatctacctccacctcgtcgtcactcggtgccagcagcagcagtaacagcaacagctgcaatctatcatctaacaagggcagcggctcccaacaacagccaacctctctggcatctttttcatccctcgggtgtcctgacagtgccagcagcatcctcagtctgagtggaccaaacacggcctcgtcgccagttatcaacaccaatgccaatcccttcaacttctccggtttgtcaatatccagttccagtctgaactcaccggagattggtagcaataatggtggtaacggaggaggaggtggtggtagcggtggacaatcgccaacctactatggcaatgccagcgtgcaatcatcgaagaactatgacgattttcggttcgacaatgatattaatttatctggctcaaatggaccgagcagtttaacgtctgagacgttgaagttgttgcaacgcaatatgggtacatacgactgttctttgcccacatcaccaaactcatcttccactggcatgtgtgcaagatattttcgcggatcgcaacaactcagcgacctgaatcacaactatgaggcgaatagcacctcctctctcttcggtggcaatcagtctttgtcacgttccaattccccgcccgacaatgaccagtcgagtctgctgtacaattttgatagcgccaacattttggacatgatcaattatctcgccatcaaccagcagcatcaaaacggacacaaccaacatcactatggtagtagctcgggcagcaacagtaacaacagcaatagtaccaacagcaactcccaatcaacacagtcacagtacagtcagatgtcgaatcagaatcagttctatcagcatcaatcacaaggaggatcttccttcggaaatggaagttgcaacagtcagtctggaaacaacgggggaagtggtggaggtggaaacagctttgtcagtgactatgaacggttgcagaacctacaggccctgaacacgttgcgtctattgcagcagtcgcaacaactgtcacaattgcagttgcaacagtatcaattcaatcagctgctcccaaactacaataacacacagcttaaaaactggtcgctgcaaaactctccaccatcgtccagcagtggcgccaacgatatcaatctggaccggattgcacgatttcaccgttcatcagctgctcattacgatgcaacctgtacatggagcggcgtgcttcctccacgctcccatcgattggtgacttactcctcgaaaatctttcttggcggcatgccttgggacatcagtgagcagtcgttggtgcagattttcaaaccattcggttccatcaaggttgaatggccaggcaaggaacagcaggcaacacagccgaaaggatacgtctacattattttcgaatcggacaaacaggtcaaagctttgctgcaggcctgtacctatacggacgcaaactgctataatggttcgagtcgtggttccaattcatctgtttccagcatcctctcctactcgtctggtggtgaagatcagcagcagctacaactagtgcaacaatccaaccaacagttgcagctaatgcatcagaataaacccctgcctgcacctggggcccgaatcaacttcaaaatctcttcaaaacgaatcaaatcaaaagacgtcgaagtgattccttggaacattgccgattccaactacgtgaaatccacttcgcaaaagcttgacccgaccaaaaccgtatttgttggagcgcttcatggacagctgacggccgaaggcttggcaaagattatgaacgatctgtttgacggagtcgtgtacgttggaatcgatacagataagtacaagtatccccttggatcggctcgggtgaccttcaacaattcacgctcgtatatgaaggctgttgtggctgcgtttatcgagattaaaacagcgaaattcacgaagaagctacaggttgacccttatctggaggattcgctctgctcaatgtgtggagttcaacacggaccttatttttgtcgagagattgtttgcttcagatacttctgccggtcatgttggcagttccagcataaccgagacagctcgctacagaaccataagcctttgacgcgcaattcgaaatcgactaccattgtcggagtgggtcctcagcagacaacacttgcatcaatgcaacaacattcacagacacagcacaaccattctcagtttaactatcatcagcagcataactctcattcgcagcatcaccataaccatagctatcatggttcactgcatggttctcccaagtcgccttcgccaccgagcagcaatagcagcagtagcaacagttcagcggattcgtcaccaatttcctgtcatggaccagccaacctacaccaacagctgcagcaacagtttggcagtctctaaaacgtgagtgacaatccacatgctttcagtagtgttgctctcgaaaaagcaaactatcacgtgtggccaaatcccatcaattgtggtgccaaagctcggcaccaatcgttgttatttattagaaattattgttgaatcgtgaacgtcacaacattttgtttgttacatcatacgtattaatcaatgctcaaactatacggcaagagcatagataatccactcgcatgttgttagttgtaaagcgacaggggtagtaatgcatagcgctgaaacacacccgtcgaggcattcctttgggaaatttcctcgctcgaaatttcctcaacgcaaaggaattccaccgggaggaaattagatgatttcacctgcatcaattcgtagcatcttcaatgcgttaacgtatggcattgcagagtttagtaataatagcgtgatattgttacttaaattgcaacagtttgctacaaaatctttagattgaaatccccaaacaacgatcgtgagaagattatacgaattgatagcgatgcctccttgcaaaatgatgtcgctgtaactcgctaaatgcttgtggatcccaaaacttgttgactagcgatggattttgaatcccaaaacacactgaaatgtttttgattacttttaagaaaattgcagtttttatgcaaaaccgctcgattcgggaaaagtaaaagaagaaaaatgaaaatcaaacacgaacataccaactgaaggaacaatgggaaagtaaactgtgaggaaaagctctttttatacaacattttaaacgtggaatgcctatcttgtgtgcgaaaagaagaaaaaatatgcgtgttttagttaggcaaaaatcaaactgttatgtaccgtcttgcgctttacgaaaaaggtgtcgacggcaggttagaacgcagctgtaaattttaagatgcattgtctaaggaatgttgttttttttttcaagagtaatctcaaaccgcaattgtaatttcgattcccttttctgttatttatcttaattatttattgatttatttatttttccttaacttaaggcgtagtttaacgatagggaattgtaaaatctcttaatgagcttttcattaatctgtaatcaatcgatcgtacagtaccggttaaaaaggtatagaccaatttcaagtttgtttggttgcatttaagctctctagaaagcatttagattcatatcagaatgattcgcgaatcattatgaactcaaatattgtccagtatgtctttttgcgttcttatttattattcattttttgtaaaccatacacttgagaataaaatgttctggcatattaatatattatatgaaaaactacgttcatcagc

SEQ ID NO: 267 - DNA, 1185 bp, Aedes aegypti
atgcacggagtggcagaggaaatcaccacgtcgttcaaccaatacggagcactcgtcgtcgattggccccacaaagccgagtccaagtcgtacttcccacccaaaggatacgcgttcctgctgtttcaggaggagcgcggtgtacagaaattgatcgaaacatgccacccggaggatgacaagctgtacattacggtgtcatcgccaaccatcaagaataaagccgtgcagattcggccgtggcgcctggccgatgccgactacgtgctggacgcctcgatgccgctggatcctcgcaaaactgtgttcgttgggggcgtcccgagaccgctgaaagcatatgagctcgcaatgatcatggaccgtctctatggcggtgtatgctacgctggcatcgataccgacccggaactcaagtatccaaagggtgctggtcgcgttgcgttctccaaccagcaaagctacatcgccgccatctccgcacgcttcgtgcagctccagcacggcgacatcgacaaacgcgtcgaggtaaaaccgtacgtactggatgaccagatgtgcgatgaatgccaaggccagcgttgcggtggaaaattcgcgccgttcttctgcgccaacgttacctgtctacagtattactgtgagcactgttgggctcacatccattcgcggtccggacgcgaataccataagcccctcgtcaaggaggcagccaacgccttccacggttttggtcaacctgggtcaacaacgggttacgtaccaccacccccatcgtttccctggaccaacagcggtagcagcgccagtggcatcggaattggctccaagccaagactacagcagcaacagcaacagaatccactaagtcgagcatcgacttcaggaggatttttggcgccaccgccaacacgttacagcggtagtagtggtagctgcggaggcagcagtaacggttctgggctcatctctagtagcggcagtagcagtccttcttctatgcgctgcagtagttcgattgatcaggcactcgctagcgcgggttccagtagttttaacaagaagcaacaagaagacatattaaaacagcatcaacggaagatgcagcagcagcagcaacaacagcagcacgcatcatccctttcgatcggcagtggcgctgccagtggtgcgatcggaaactaa

SEQ ID NO: 268 - DNA, 2397 bp, Culex quinquefasciatus
atgggaagtcaattgaaaagaacggaaagcgacctcggcggtttgtcctccaatggcaacaacaccaacagcaatggcacaagcaacctcacgtcggagacgttgaagctgctgcagcgcaatatggccaccagttacgactgctcgccgctaccgacctccccgagctcttcgtcttccaccacggcagcggcactttgcgcgagatatttccgtggcagccaacagcagccaacgatcagcgacctgaatcacaacggctacgaaccgaccagctcgtcctctctcttcagcaccagcagcaccaccaatcagtcatcgtcgctgtcacgttccaattcaccgcccgacaacgatgccagcctgctggccaatttcgatagcaccaacattttggacatgatcagttatctcaccatcagccaacagcagcagcagcaacagcaacaaaatggtcactacaacaactcgaatggagttggctcgaacggctcctcccattacggccagacgcaacagtcgccgtcgtcttcggcgtcgtcgagtttgaactcgttttaccaacagggaggaggtggatcttcctacggtgccaacgggaactgcagtggcggtggcgttgttggccagggcagcagtaatggtggtggcggcggaggctgtggcttctccagcaatgactacgagcggctacagaatctgcaagcgctcaacactctgcggctgctgcagcaatcgcagtaccaactgcagcagcagtatcaacagttcaaccagctgatgcccagctacgggggttcgcagctcaagagctggccctcgcataactcacccccgtcgtcgtcgggcagcagcaacggaggtggcggcggcggcagcggcaacgatatcaatctcgaccggattgcacgatttcaccgttcatcagctgctcattacgatgcgacgtgcacgtggagcggtgtccttccgccccggtcccaccggttggtgacctactcgtcgaagatcttcctcggcggcatgccctgggacataagcgagcaatcgctggtgcagatcttcaagccattcggttccatcaaggtcgaatggccaggcaaggaacaacaggcgacacagccgaaaggctacgtgtacatcatctttgaatcggacaaacaggtcaaggcgctgctgcaggcctgcacttattcggacgcgaacggctacggcggttctagcagtaggggtggcaacaacaacaacaacaactccggaatgatggccagcggtaacggcagttgcaacgatgacatgcagttggttccgctctcgccgggccagcaggctctggtcaacaagcagcaccagtcggtgtcgatggcgggagcccggatcaacttcaaaatctcctcgaagcgcatcaagtccaaggacgtcgaggtgattccgtggaacattgccgactcgaactacgttaagtcgacctcccagaagctggaccccacgaagaccgttttcgtcggagcactgcacggtcagctgacggccgagggactggccaagatcatgaacgacctgtttgatggggttgtgtacgttggcatcgacacggacaagtacaagtacccgctggggtcggctcgggtcacgttcaacaattcgcgctcgtacatgaaggccgtggtggccgcgtttatcgagatcaagacggcaaagttcaccaagaagctgcaggtagatccgtacctcgaggactcgctgtgctcgatgtgcggcgtacaacacggaccatacttttgccgggagattgtgtgctttagatacttctgtcgctcgtgctggcagttccagcacaaccgggacgcttcgctccagaaccacaagccgttgacgcgcaactccaaatcgacgaccattgtcggcgtgggaccgcagcagcaacagccacagcaacagtctccaccggccagcatcgattccagcggccttcaccgtcggcagcagcaaatgctgtaccaccatcacatgtcccagtcgcagcagcagcaacaacaatctccgccgacctccgacgtccaccgtcggctgtacaacgttggccacttgcaggacctgtcctcgtcctcgtcgctgtcgcttccccagtcgccttcgccgtcgtgcaccacaagtagctccagtggtagctcggccgactcctcgccggtcaactgtcacggcccggcaaacctgcaccagcagctgcaacaacagttcggcggcggcctagagttccaccgggaaggcaacgatcgacacatccacagatccgtgcgacgatcccctctggagccaccaaagcaccagcttgacgacattagcacgtttgactactggcgccaagtttcggtgctaaccttgcttagagagtag

SEQ ID NO: 269 - DNA, 1245 bp, Culex quinquefasciatus
atgctgcctgaaaagtcggaggagcgcggcgtccagaagctgatcgagacgtgccacccggaggacgacaagctgtacattacggtgtcgtcgccgaccatcaagaacaaggccgtgcagatccggccgtggcggctggccgacgccgactacgtcctggacgcgtcgatgccgcttgacccgcgcaagaccgtcttcgtggggggcgttccgcgcccgctcaaggcttacgagctggccaccatcatggaccggctgtacggtggggtttgctacgccggaatcgacaccgatccggagctaaagtacccgaagggcgccggccgcgttgcgttctccaaccagcagagctacatcgcggccatctcggctcggtttgtgcagctgcagcacggcgacattgacaagcgcgtcgaggtgaagccgtacgtgctggacgaccagatgtgcgacgagtgccagggtcagcgctgcggtggaaagtttgcgccgttcttctgcgccaacgttacctgtctacagtattactgcgagcactgctgggcccacatccattcgcgctcgggtcgcgagtaccacaagcccctcgtcaaggagggcgcggaccggccccgggcaccgccgcgatccgtcacgagcggtgccgcggcgggcagaacagcgccatctgccttcgcgagcgccacctcgtcgaacagatcgggcaccaacagcaacaaccaccaccaacagcaccaccatcagcagcatcaccatcaatcagctgctggcagcacttccggttcgtccaacgccgcggcctccctcggcggcggcagcagcacttttcacggctttggccaacccggatcgtccaactacgtaccaccaccgccctcgttcccctggaccaactccagcggcatgggcaacctggggctcggaaccggttccggttccggaacgtcgggcaagcagccccgcacaagccatcacctaggcggcggccaccgcattccgacggcaggcggcttcctggccccgccaccggcgcgctactgttccggtggttcggctggaagtgcggccaccagcggaggcgccagcggcagtagcagtccgtcttcctcgatccggaccggaagcgctgaccagttggcgtcgccctttggtaagaaacagcaggaggacattatgaagcagcatcaccggaagatgcaacagcaacaggctatggctgcgaatggtggcgcgattgggaactaa

SEQ ID NO: 270 - DNA, 2901 bp, Anopheles gambiae
atgtgtcggcagtggtggaattgctgcagcgaatgcattgaccaccgaaacgctgaagcaaagacgacgaaacattactccccctcactgacactgctctgctccaacagtggacggaactaccgaaacggtagcagcagctattcgcattcccagcaaaatgcattatcccatcatcaacaacagtcgtcgaccgtcagcagcgtacagcagcaacagtacgatctgctatcgggcagcaatgggtcagcgagcggcatcaacggaccagcaggaggaggcgccggaggcaatggaattacctccaacaataaccaccttggcagtggaatgggtagtttcgattcggctaacagtggtaccaccaacagcagtgctctgtcactgttcggatcgggcaatggttcactgtcccggtcgcactcaccgccggaccattcggacaccagcaacttgctgacgagcctggaaagcaccagcatactggatatgctaaactatcttactctaggtcagagtacgaattcggtgccgaccaccagcgggcttcacaatcaaacttcccaacatcaacaatccaacggtggtcagttggcgccctacacctcgacactgaacacgctctatcaacagcagcagcagcagcagcaacatcaacagccgacagccgcttcgggatcgtttgctgggtccaatgctgcgagcaataatggaaacacagttggtctgtctgggctaagcctgggcagtaccggatttgctacaagcgaatacgatcgtctgcaaaacctgcaagcgctcaacactctgcgcctgctgcagcaaacccagcagctgtcccagctgcagcagctacagttcaaccagtcgctattgccagcagcgactggaaatggtggcgccagcattttcggcaactgtggcgctggcacggcggcaggctctatttccacgtctggtaataatgcgcttaccgcaagcggcagcattggctcgaacatgggctgtaccgggggcaacaatggcaataatagtatgcagggaaaaagctggtcctcatcgcagcagcatatggtggtgtcgcatcgccagggctcctcgtcgccgtcactaaacggtggatctgctgggaacggcaatgggtacaatgacatcaacctcgatcgcatcgcccgatttcatcgatcctccgccgcacattacgatgccacttgcacttggagtggcgtgttgccgcctcgctcaagtcggctggtgacgtactcgtcgaaaatattcctcggcggtatgccgtgggacatttccgaacaatcgttggtgcaaatttttaaaccattcggctcaatcaaagtcgaatggcctggaaaggagcaacaggcgacacaaccgaaaggttacgtgtacatcatcttcgaatcggacaaacaggtgaaggcgttgctgcagtcatgcacgtacactaccccgaacggtggtatgcacgtccatcatggtggcgcaggtccaggtaactacggaggcagccacactgccgtgaacggtgcctcgtcgaacggttcggtagcccgggctgctggggcgaactacgacgaggcaccccctcaccaacaccagcagtcccaccggcagcaagtattgccgatgtctaatctgaataaaccgctagctccttcaggtgcgaagatcaacttcaaaatatcgtcgaagcgcatcaaatcgaaggacgtcgaggtgatcccgtggaacatcgccgactcaaactacgtcaagtcggcttcgcagaagctagatccaacgaaaacggtgtttgtgggggcactgcacggtcagctgacggcggaagggttggcgaagatcatgaacgatctgttcgatggcgtcgtgtacgtgggcatcgatacggataagtacaagtatccgctgggttcggctcgcgtcacgttcaacaactcacggtcgtacatgaaggccgtctcggctgcattcatcgagattcgaacctccaagttcaccaagaagctgcaggttgatccctacctggaggattcgctttgctcgatgtgcaccgtacagcacggaccatacttctgccgggaaatcatgtgcttcagatatttttgccgttcctgctggcaacttcaacacagccgtgaggtgtatctgcagaaccataaaccactgaccagaaactccaaattcaccgcaatcattggggttggccctcagcaacatcagcaacaatcgcacacatccggtggcagtaacggcagcaacggcaaccatcacctgcaccaacagcagtcgtcattcgatcacagcccgtactacagtaatcaccatcaccatcatcaccaccatcatcacggtggctctggtagggattcgctgagccagcagtctggctctagtttgtcatcacacaatcatcaatatcatcatcacaacaaccaccatcatcagcagcaacagcaacagggtagtcgtttaagcttgctccagcagcagcaacatcatcaccacaatcaccaccgtggcctcgccaagtctccctcaccgtcgatgtgcaatggcgccgagggcaacaacaacggtattggctgcggtggcaacaccagcaacactagtagcaatagttccagcccgattggtgtgggaacgagcggccgtagcataaatgccagcagcaccagcagcagcagttgcagtagcaacagtctcaatggtagcaacaataacgtcaactgcagtgctggaaccgccggtggcagcaccagcagtggtgagcacgtatcgttgaacctgcaacagcttagctttgttgcgggtggcggtggtactggtggcagcgatggacttagtggtagtagcaatggtaacggtggtagcggtatgctcatttaa

SEQ ID NO: 271 - DNA, 465 bp, Aedes aegypti
atgcattttgctttccaattcaacaacatgagagtgctcgtccttcttctatttgtcgttcagttaataaatggcgatagacgattcttcatacccagtttaaaggccaactggtacaaggcggtagagttctgcaccacattggacaagagattggcatcgatcgaaaatcaggccaaaagcgacgcaatcgctcagtatgtgcgcgagtcggataaattcgccaacgtaagtcggctatggatcggtgccagcgacctggccgaggagggcgttttcacgtggctccacaatgagcagctcctcacgtacacgctttggaatgaaaacgaaccgaataacaacgacaaaaaggagcactgcgtggagctgacctatcataccggaaagtggttttggaacgacatggagtgtgcatacgatacgtacttcatctgtgaagaaatcgaacgacaatgtctgtag

SEQ ID NO: 272 - DNA, 1142 bp, Aedes aegypti
gtgagaacactttcacaccattcgatcaagatgatacgcttcatcttgatcgtggcggcggctcttggaagcccagccgtcctcggccagtactacaatactttctcttacaatggccagtatcgttcgaccggatcaatcgcctcgcaaattcggaacctcaccagaacctgggttgccggtaacaatactctgccaccagcggcctacttcaaaggtgttctgtacgatcgtctaggtgaaacgcgtttggctccggccattctggtcaaccctcaagatatccaactgccagaatcgttcgacgcccgccagaagtggtcccaatgtccaagtctgaacgtgatccgtaaccagggatgctgtggatcgtgttgggctatctcggccgcttcggccatgaccgatcgttggtgcatcaagtccaagggcaaggagcagttctcgttcggtgccaccgatatgctggcttgctgtcacgcttgtggagatggatgcaagggtggatatctgggtccggcttggcagttctgggtcgaacagggcgtctcttcgggaggtccgtacaattcgcgccagggatgtcatccatatccgatcgatgtgtgtgacgcatccggtgaagaagccgacactcccaagtgttcgaagcggtgtcagtcgggctacaacgtgaccgatgtttggcaagatcgccgctacggccgagtggcttactccattcccaatgacgagcagaagatcatggaggagatctacattaacggaccggttcaggccgcgttcatgacctaccaggatctgcacgcctacaagagcggggtttatcggcacgtgtggggtcacatggccggtggtcacgccgtcaagctgatgggctggggtgtggagaacggtctcaagtactggttggtggccaactcctggggtgatgattggggagacaatggtttcttcaagattgtccgcggagagaaccactgcggaatcgagaaggacgtgcacgccggactgccgagcttcaacaaacataaggaattagctggaattcacttctgattcatcaattcaatacgaaatcagaatatgatttcaataaaagaatttgaataaacattcttatagttcttcttcttcttggc

SEQ ID NO: 273 - DNA, 1195 bp, Aedes aegypti
atgttccgtttcgtgttggtactggcctgctgccaggccgcattggcccaaggctacggcactccgtccccaaagttctcatcgaaaaactctgcccgctacccagacaatcagtacaaccaatactcgggtgaatattccggtgctcaatatccaagtggacagtacccagtgaaccgcaaccagtcctactttggagccagattccagaacaccgccttgttggcatccaagttcagtcacttgacgagaacatggagagccggcagcaacccgaaacctccggcaggataccgatcgggtgtcaacatggctgacctggagcgcactaagctgccgctgggaatcatggctgacgtcgaagatttggatcttccggatacattcgacgctcgtgaaaagtggccagagtgtccaagtctaagggaaatccgcgatcaaggatgctgcggatcctgctgggccgtttcagctgcctcggccatgaccgaccgttggtgtgttcgctccaagggtaaggagcagttcattttcggatctttggatctgttgtcttgctgtcactcgtgtggacagggttgccgtggaggtactctgggtccggcctggcagttctgggtcgagaagggtctttcttcgggaggtccgctgaactcgcgtcagggatgtcacccatatccgattggagaatgccgcattcccggagaggatgaggatactcctaagtgttcgaataaatgccgctccggatacaacgtgaccgacgtctggcaggatcgtcactacggacgagtagcttactcgcttcccaatgacgagcgcaagatcatggaggagatcttcatcaacggaccagttcaggctgctttccacacctatttggatctacacgcctacaagagcggaatctatcggcacgtgtggggaccgttgtctggaggacatgccgtcaagctgctcggatggggcgtggagaacggagtcaagtactggctggtggccaactcgtggggtcgcgagtggggagaaaatggattcttcaagattgtccgcggtgagaaccactgtggtatcgaggagaacatccacgcgggtctgcccaacttccaccgacagggagaggctggcaaatactttgctgctgggtatggctacaactgagagattcatggatattaaatgaactataaatcag

SEQ ID NO: 274 - DNA, 942 bp, Aedes aegypti
atgaagcacattatcctggtactgctggcactatgcgcaatggcccacagcaaaattctttccagcaaccttaccacaacctccccatttgcttggatcctggacctccccggtgtcccattggaaaaactcaaggaaacgcgtctccatccggccatcaacgttttcgccgaggatctggtcctacccaaatcgttcgacgcccggcagcagtggccccagtgcagcagtctgaacgagattcgaacccagggatgctgtggctcgtgtgcgtacgtctctggagcctcggccatgaccgaccggtggtgcattcattccaagggtaagaagcagttcacatttggggcgttcgacttgctgtcttgctgttacgaatgcggaggtggatgcaccggtggaggcattcccggcccgatttggtcctactgggtgaagcagggcgtgtcgagtggtgggccttacggatccaaccaaggctgccatccgtatccgatgccaccgagttgtcccaaaccttcggagggtgactatccagacgaaccgaattgtagcactcgatgcaatgcgggttataacgtgaccgaggacctgcgggatcgtcgctttggtcgggtggcgtattcaattccggctgacgaacggaagatcatggaagacattttcgtcaatggaccggtgcaggcggtgttccagtggtacgaggatatcgtgaactactcgggtggagtctatcggcaccagagtggacgcttgaagggaggacatgccgtgaagttgattggatggggcgttgaagatgggaccaagtactggctggtggccaattcgtgggggagggtttggggcgacgatgggtttttcaaaatggtgagaggggagaatcattgtggtattgaggaaaatgtgcacgctgggttgccaagttttgttgagtattga

SEQ ID NO: 275 - DNA, 1230 bp, Aedes aegypti
tttctccctcgtttgagggtgcacagcacgtagagatgttccgtttcgtgttggtactggcctgctgccaggccgcattggcccaaggctacggcactccgtccccaaagttctcatcgaaaaattccgcccgctaccaggacaatcagtacaaccaatactcgggtgaatattccggtgctcaatatccaagtggacagtacccagcgaaccgcaaccagtcctactttggagccaggttccagaacaccgccttgttggcttccaagttcagtcacttgacgagaacatggagagccggcagcaacccgaaacctccggcaggttaccgatcgggtgtcaacatggctgacctggagcgcactaagctgccgctgggaatcatggctgacgtcgaagatctggatcttccggacacattcgacgctcgtgaaaagtggccagagtgcccaagtctaagggaaatccgcgatcaaggatgctgcggatcctgctgggccgtttcagctgcctcggccatgaccgaccgttggtgtgttcgctccaagggtaaggagcagttcattttcggatctttggatctgctgtcttgctgtcactcgtgcggacagggttgccgtggaggtactctcggtccggcctggcaattctgggtcgagaagggtctttcttcgggaggtccgctgaactcgcgtcagggatgtcacccatatccaattggagaatgccgcattcccggagaggatgaggatactcccaagtgctcgaataaatgccgctccggatacaacgtgaccgatgtctggcaggatcgtcactacggacgagtagcttactcgcttcccaatgacgagcgcaagatcatggaggagatcttcatcaacggaccagttcaggctgccttccacacctatctggatctgcacgcgtacaagagcggaatctatcggcacgtgtggggaccgttgtctggaggacatgccgtcaaactgctcggctggggcgtggagaacggagtcaagtactggctggtggccaactcgtggggtcgcgagtggggagaaaatggattcttcaagatggtccgcggtgagaaccactgtggtatcgaggagaacatccacgctggtctgcccaactttcaccgacagggagaggctgccaaatactttgctgctgggtatggctacaactgaaagattcatggatattaaatgaactataaatcag

SEQ ID NO: 276 - DNA, 1195 bp, Aedes aegypti
atgttccgtttcgtgttggtactggcctgctgtcaggccgcattggcccaaggctacggcactccgtccccaaagttctcatcgaaaaattccgcccgctatccagacaatcagtacaaccaatactcgggtgaatattcaggtgcccaatatccaagtgggcagtacccagcaaaccgcaaccagtcctactttggagccagattccagaacaccgccttgttggcttccaagttcagtcacttgacgagaacatggagggccggcagcaacccgaaacctccagcaggttaccgatcgggtgtcaacatggctgacctggagcgcactaagctgccgctgggaatcatggctgacgtcgaagatttggatcttccggatacattcgacgctcgtgagaaatggccagagtgcccaagtctgagggaaatccgcgatcaaggatgctgcggatcctgctgggccgtttcagctgcctctgcaatgaccgatcgttggtgtgtacgctccaagggtaaggagcagttcattttcggatccttggatctgctgtcttgctgtcactcgtgtggacagggttgccgaggaggtactctcggtccggcctggcagttctgggtcgagaagggtctttcttcgggaggtccactgaactcgcgtcagggatgtcacccatatccgattggcgaatgtcgcattcccggagaggatgaggatactcccaagtgttcgaataagtgccgctccggatacaatgtgaccgatgtctggcaggatcgtcactacggacgagtagcttactcgcttccaaatgacgagcgcaagatcatggaggagatcttcatcaacggaccagttcaggctgccttccacacctatctggatctgcatgcttacaagagcggtatctatcggcacgtgtggggaccgttgtctggaggacatgccgtaaagctgctcggatggggcgtggagaacggagtcaagtactggctggtggccaactcgtggggtcgcgagtggggagaaaatggattcttcaagatggtccgtggtgagaaccactgtggtatcgaggagaacatccacgctggtctgcccaactttcaccgacagggagaggctgcaaaatactttgctgctgggtatggctacaactgagagattcatggatattaaatgaactataaatcag

SEQ ID NO: 277 - DNA, 1147 bp, Culex quinquefasciatus
tcgggaaggtgaacaaatcacccaactcaacccttcacgatgatccgcgcccttctgctcctggtgtgctgccaggctgctttgtccattgacagcagcagcttcatcaagcaggctcaggtccctggccagaaccagaactcggtccaacagcaggccgccagtcgcgcctcggccaacatcgccgccatggtccgcaaccgaaccaactcgtggaccgctggagcacctcggcagccgctgtcctcgtaccgcgtcggtgtcaacatggaggaactggagtccaagcgacttaagccgggcatcctgatcttgaaggaggatatcgacctgccggagcagtttgacgcccgcgacaagtggcctcagtgcccgagtctgcgcgaaatccgtaaccagggctgctgcggatcgtgctgggccatttccgccgcggaggccttcaccgatcggtggtgcatccactcgccggagcataccacgttctcgttcggatcgttcgacctgatctcgtgctgtcactcttgtggagacggctgccagggaggagttctcggaccggcctgggattactgggtccagaagggagtctccagcggaggtccgtacaattccaagcagggctgtcactcgtatccgtttgacacgtgccactccccggatgaggatgacgacgctccgaaatgttcccgcaagtgccaatccagctacagcgttcaggatgtttccaaggatcgtcgctttggccgcgtagcgtactccgtggtcgcggacgagcaccgcatcatggaggagatcttcgtgaacggacccgtgcaggccgccttccaggtttacctggacttcaagacgtacaagagtggagtgtaccgtcacgtgacgggaccactggagggaggtcacgccatcaagatcctcggctggggcgttgagaacggcaccaagtactggctgtgcagcaactcgtggggtgaggactggggcgatcacggcttcttcaagattgtccgcggtgagaaccatctgggcattgagaccgatgtgcacgccggactgccgcattatcgcaagcacaaggagatgtttgagtacgattactgagtgatgttttcctaatcgggcataataaagaagtgctgaagtaaat

SEQ ID NO: 278 - DNA, 1152 bp, Culex quinquefasciatus
gagtgaacacctcgaacctcgcgaagatgttccgcgccatcctagtgctggccgtcgtcggccaggccgcgttcgcccagtacggccgcccgtcgggtagccaatccggcagcttccctccgtacgaggccacgatctcgatcgccgagaaggtacgcccactggccaccacctggactccgggagcgaacccgctgccaccgaacctctaccggaccggtgccaagcgcgaggatctggagaagcaccgacttccgctcgggattctggtcgtcaaggaccacatcgtactgccggaacggttcgatgcccgcgaccgttggccagagtgcaccagcttaaagcagatccggaaccaaggctgctgcggatcttgctgggctatttccgctgcggagaccttcaccgatcgttggtgcatccactcggaggataaggaccagttctcgttcggagcgtacgacctgctgtcctgttgccactcgtgcggtgacggatgtcagggtggaaaccttggaccggcttggcagttctgggttcagcgtggagtctctagcggtggtccgtacaactcccgccagggttgtcatccttacccggttgacgtgtgccattcagccgatgaggacgccgatacccccaagtgtacccgcaagtgtcagtccatgtacaacgtgaccaacgtatccgacgatcgtcggttcggccgggtggcctattctgtgtcccaggacgaggagcgcatcaaggaggaaatcttccgtaacggaccggttcaagcgtccttcgacgtctacctggacttcaaggcgtacaagactggagtgtaccggcacgtgtttggccccatggagggaggtcacgccgtcaagatgatcggctggggtgttgaaaacggcaccaagtactggctgtgcagcaactcgtggggtgaggactggggtgagcgaggtttcttcaagatcgtccgcggggagaaccactgcggcattgagtccgatgtgcacgctggactgccgcactacgccaagcgggatcagatcgactactgagaaatgtgttgagtgaaaaatacagctcattaaaatcaaccagaattttgaatttttcattcacatcgactgaataaattagattaaacaattcccactt

SEQ ID NO: 279 - DNA, 1280 bp, Anopheles gambiae
ctgtcgagctaagttctcgcaatcaaaatggcatttgcattgatagtccttatcggagtgttcagtctccagggcagccttggaacgggcagtgccgagaaccagctaggattgaaactggtggtgaaaaccagtgtagaggacacccaaccccaaaattactaccgagattccgcctcatatgggtcgcgctttgccgattcaagttctttcgccccagaattcttccgcactggatatggcaatgtgctcacgtcgcaagctgcttttgtggaagcaatcaacaaccgaagcaccacctggaaagccggagtcaacccgcagcgcaacgatcagtaccgcacaggtgtgctgtcggatgaatcgatgaagttccaactgccgctgggtttcgtgctgaagaaggacgaacaaccgctgcccatgtcgtttgacgcacgccaaaagtggtcgtactgcccgagcatgaacatggtacgcaatcagggatgttgcgactctagctacgccgtagcagcagtatccacgatgaccgatcgctggtgcgtgcactcggaaggcaaggcgcagttcaacttcggagcgtacgatgtgctttcctgttgccatcgatgtggattcggctgtgacggtggtgtgccgagcgccgtctggcactactgggtcgagaacggtattaccagtggcggagcatttgggtcccatgagggctgccaatcgtacccgttcgatgtgtgcaaaaagtcgggcgattccaatgataccccgcggtgtttgcgcttttgccagcccggttacaatgtcacgtacccggaggataagcattacggtcgggtggcctacaccgtgccaaaggatgaagagcgcataatgtacgaagtgtttaacttcggtccggcccaggcaacctttaccatgtacactgactttgtgcagtacaagagcggagtctatagacacacgttcggtgtgcgtgtcggaacgcactcggtgaaggtgatgggctggggcgtggaaaatgacgtcaagtactggctgtgtgccaattcctggggtgcacagtggggagatggtggtttcttcaagatcgttcgaggagaggatcatttgagtttcgaaacgaatgtggttgcaggactaccgctattccgctaaaaggataaacgagtgttggtgttggcttagtggagcaaatacatacctactgagaccgtttacgcttgtgatggtgttcactacgacgttgtactgaactgcacaggttcactgattgagaatca

SEQ ID NO: 280 - DNA, 1195 bp, Aedes aegypti; identical to SEQ ID NO: 273

SEQ ID NO: 281 - DNA, 1142 bp, Aedes aegypti; identical to SEQ ID NO: 272

SEQ ID NO: 282 - DNA, 942 bp, Aedes aegypti; identical to SEQ ID NO: 274

SEQ ID NO: 283 - DNA, 1230 bp, Aedes aegypti; identical to SEQ ID NO: 275

SEQ ID NO: 284 - DNA, 1195 bp, Aedes aegypti; identical to SEQ ID NO: 276

SEQ ID NO: 285 - DNA, 1147 bp, Culex quinquefasciatus; identical to SEQ ID NO: 277

SEQ ID NO: 286 - DNA, 1152 bp, Culex quinquefasciatus; identical to SEQ ID NO: 278

SEQ ID NO: 287 - DNA, 1280 bp, Anopheles gambiae; identical to SEQ ID NO: 279

SEQ ID NO: 288 - DNA, 1195 bp, Aedes aegypti; identical to SEQ ID NO: 273

SEQ ID NO: 289 - DNA, 1142 bp, Aedes aegypti; identical to SEQ ID NO: 272

SEQ ID NO: 290 - DNA, 942 bp, Aedes aegypti; identical to SEQ ID NO: 274

SEQ ID NO: 291 - DNA, 1230 bp, Aedes aegypti; identical to SEQ ID NO: 275

SEQ ID NO: 292 - DNA, 1195 bp, Aedes aegypti; identical to SEQ ID NO: 276

SEQ ID NO: 293 - DNA, 1147 bp, Culex quinquefasciatus; identical to SEQ ID NO: 277

SEQ ID NO: 294 - DNA, 1152 bp, Culex quinquefasciatus; identical to SEQ ID NO: 278

SEQ ID NO: 295 - DNA, 1280 bp, Anopheles gambiae; identical to SEQ ID NO: 279

SEQ ID NO: 296 - DNA, 2346 bp, Aedes aegypti
atggagatatcggtggaagaatcggaattttgtgaggagaccaatttcgactctccatgtcctagtccgatggaggagaaaacgttcaacatggatttcctaaccatcaacggtcacttcacgcctaaatctgcgtattcatctgcgtgttcaacgcgtagcgttagtttggccaacagtccggttcctccggatgatggcgaagatgaaggcaactatgctacgatcaatgttcttcaaccgaaacacattttcccagctacgggccgaactactccagttttcacctggaatcctctgcccacggccaacggtatcgtgtacgcgaaaaacaaagacagtgaagtgaagttttccaggttcgaggatgattcatcggattcggaaagtacgcacctcagtgatgccgaagaaaaaactgaccagaacaaacccaaggactgctacccgaactgtgatgtcaatgtgtggttacgatcctgtgagcaggagattgtcgaacccatcgagggaaaagtgaggggcgtggtgccggaatggttgaccgggagcttactgcggaacggaccagggagtttgaaggtgggagagatgacgttcaaccatctgttcgacagttcagctctgctgcaccggttcaacatcgaggacgggaaagtgacataccagtgtcggtttctgaagtcggatgcctacaagaagaaccgagccgcgcaacggattgtggttacggagttcgggactagtgctgtaccggatccctgccacacgatatttgacaaaatcgctgccatcttccgcaaaccaggagaaaacaactccgacaacgcgatgatatcgatctacccctttggcgatgagtactttgccttcaccgagagtccaatcatccaccggatcgacccgcaaacgctgggcaccgaagcgaagctgaacgtatccgactacgttggaatagttaaccacacgtcacatccacacgtcatgtccgatggtaccgtgtacaacctgggctgctccgttaccaagacgggaccggcctacactatcatctgcttcccccatggtgagaatatgttcgaaaacgcccggattgtggcgtccgtgccggcccgctggaagttccaccccggatatatgcacacttttgggataacggagaatttcttcatcgtggtggaacaaccgctgagtgtttccgttccgtcgatgttggtcagtcaaatccggaacgaaccaatggcttcgtcgttgaaatggttcgagaatcagcagacttacatctacctactggacagggataccggagagctgaggcatacgtttcaggcggagtcatttttttaccttcacatcatcaaccaatacgagaaagacggacatgttgttctggatatctgttgctataaggaccccgccatgctcaactgtatgtatatcgacacgatgaagagcatgcaacagaatccagactacgccaagatgtttagaggtcgtccgctacggtttgtgcttcctttgaactacaaggatcggatgcgaagttctaccacaagtattttctccgtgagtcgaccctggagctgtttgatcaaaaaactgagtgcggatgacgatgagaagaagatagacgaagaccgtggagatgttaccctgaagaacttagtcacactggaaaacaccaaagcgacagcatacgttatgcccgatgaaagcatattctgcaaaccggagttgctctgcgacttaggatgtgaaactccaaggatccactatgaggaaaacttgggccgagattaccagtacttctatgcaatcagttcggacgttgatgctagcaatccgggcacgctgatcaaggtggacgtcgtgaacaagaccaagcttacctggtgtgaggagaacgtatatccgagcgagccaatctttgtgccaagcccatctccacagacggaggacgatggcgtagtcctagcggctatggtttggggtcgcgaagaggagaaccgagtcggactgctgatactggacgccaggacgttcaccgagattgcccggagtgagttcatcacgcccggtccggtgcccaagtgcctgcacggatggttccaatcgtcatcgaagcgagctgagcaataaccctgctcccataaatcaatcaattgctactgcttgccctgccaatatagtgggtgtcctttgatttgatgtccgatgtgtagacaaatgtgctcaattatgcatgcacgcggaataaagtccattatcacctggcatgatgggcacatttgatattcgtgtattgatgttagacgccgtggtcacaaataaagttgatgttttact

SEQ ID NO: 297 - DNA, 2178 bp, Culex quinquefasciatus
atggatacgatctcggtggaagtcgaggaggaattttgcgaggagaccaactttgagtcaccttgtccgagcccgctggagggggacaaagtgctcaacatggacttcctgacgatcaacgggcgctttacgcccatgtcgggccaggccagtgcgtgttcgacgaggagtgtcagcctggccacgacgccgattccgccggaaatgctcggtgaaggcgagcaggaggaacagggagaaatagtgatcaatgtgcagccgaagccgagcaggcatttgtttgagagtagtgggcggacgacgccggttttcacgtggaatccgttgcccaccgggaacagcattgtgtacgcaaagggcaaggataatgaagtgaagtttaagaagtttgaagacgattccacggacacggaaagctccgcggtcagcgacgccgagggagacgaaagcgccataacagccgaaaccacccacaaaaagcacgatccctcgaactgctacccaaactgcgatgtgaacgtgtggctgcgatcgtgcgagcaagaaatcgtcgaacccatcgcgggcgaagttcgcggcgtcgtgccggagtggctcaacggaagtctgctacggaacgggcccggaagtttgaaggtcggcgacatgacgttcaaccatctgttcgacagttcggcactgctgcacaggttcaacatcgagaacggacacgtgacttaccagtgtcggtttttgaagagcgatgcgtacaagaagaacaaggccgcccagcggatcgtggtgacggagtttgggacgagcgcggcgcccgatccgtgccatacgatatttcatagaatcgctgcaatcttcggaaagcctggtgagaacgtttcggataatgcgatgatctcgatctacccgtttggagatgagtacttcacgttcaccgagagtccgattattcacaggattgatccggagacgttggaaacggaggcgaagctgaatctgtccgattacgtgggtatcgtgaatcacacgtcacacccgcacgtaatgtccgacgggacggtgtataatttgggcatgtcggtcacgaagaccgggccaacgtacacgatcatctgcttcccgaacggcgagcacatgtttgagaatgctcggattgtggcgtccgttccggcgaggtggaagtttcatcccggatatatgcacacttttgggattacggagaactttttcgtggtggttgagcagccgttgagcgtatccgtgccgcacatgttggttagccagatcaagaacgaacccatggtgtcctcaatgaagtggtttgaaaagcagcaaacttacatctacttgctggatcgtgacactggagagttgaagcacacgtttcacgcggaaccgttcttctatctacacatcatcaaccagtacgagaaggaaggtcacgttgtgttggacatttgctgctacaaggatccggcaatgttgaactgcatgtacgtggacaccatgaagaacatgcagcagaatccagactacgcgaggatgtttcgcggaagaccactgcggtttgtactgcctttgaacttcgaagaatcgttgaagcgatcgtcaagtgtgttttccgcttcgaaatcgtggactgggttgatgaagaggttgagcgttggagacgatctcgatgcggatgacagcttgacgttgaagaacttggtgacactggaaggcatgagtgcaacggcttacgtcatgccggattcaacaatattctgcaaaccggagcttctctgcaatttgggctgcgagacgccgcggatctactacgaggaacatctgggtcgggagtaccgctacttttacgccatcagttcggacgtggacgcgagcaatccgggcacgttgatcaaggtcgacgtgatcaacaaaaccaggctgacctggtgtgaggagaactgctacccgagtgagccgatcttcgttccggcaccggatccacagtccgaggacgacggcgtcgtactggcggccatggtttggggtcgcgacgaggagaaccgcgtcgggctgctggttctggacgggaagaccttcaccgaatttgcgcgcagtgagttcgaaacgcccggaccggttcccaagtgtctgcacggctggttccagtcgtcgacgtcaaagaagagtcaataa

SEQ ID NO: 298 - DNA, 2668 bp, Anopheles gambiae
atggacgttaccgtggaagacttttgcgaggaaaccaactttcccgaggagtcgccctgcccgagcccgttcgagccagccaagcagctgctcaacattggcttcctgcagatcaatggacgctttacgccccactccggcccatcgtccgtgtgttcgacgcgtagctgcagcctggcggccactcccgttccaccggacgcaaccgacgcaacggacgagcaggacgagcagcggcacaccggtgaggcgggcgggcaggaggagaacctgaagccccgcaaatggtccctgccccatctgccgacggaggcgaccaagttcgagctgactgggcgggcgacgcccgtcttcacctggaacccgatgcccacgtccagcaatgtgatttacgcgctgagcgacaaaaaccagcagatcgtcttctcccaggccgaactggaagtggacgaagagccggcaacggagccaacgaaagcagcgaaggacaccacccagccgaaggacgacatgtacccgaactgtgacgtgaacgtgtggttgcgttcctgcgagcaggagatcgtggaaccgatcgagggcaaggtgcagggcacggtccccgagtggttaaacgggagtctgctgcgcaacggccccggcagtctaaaggtgggcgacatgatgtttaaccacctgttcgatagttcggcactgctgcacaggttcaacattgataatgggaagatcacgtaccagtgtcggttcctaaagtcggacgcgtacaagaagaacaacgcagcacggcgcatcgtggtgactgagttcgggaccagtgccgtacccgatccgtgtcaaacgatcttccaaaaaattgcagccgtgttcaacaaaccgggcgtcaacaattcggacaacgcgatgatatcgatctacccgttcggggacgagtttttcgcgttcaccgaaagccccatcatccaccggatcgatccggaaacgctcgacacggaggcgaagctgaatgtgtccgactacgtcggtatcgtcaaccacacctcccatccgcacgtcatgtccgacgggacggtgtacaatctgggctgttcgatcactaaaacgggcccggcctacaccatcatctgcttcccccacgggccgggaatgtttgagaatgcgcgcattgtcgcctcggtcccagcacgctggaagttccacccggggtacatgcacacgttcggcatcacggagaactacttcgtgattgtggagcaaccgctcagcgtgtccgtgccgacgatggtggtgagccagatccggaaccggccgatggcggccgccctgaagtggttcgaaagccagcagacgtacatatatctgctggatcgggatacgggcgagctgcggcacacgttccacacggaaccgttcttctacctgcacatcatcaaccagtacgagcgggagggccacgtcgtgctggacatctgctgctacaaggatccggccatgctgaactgcatgtacgtcgacacgatgcgcaacatgcagaacaatccggactacgcgaagatgttccgcggccgaccgttgcggttcgtgctgccgctcaactgcggcacggagcgtgccaagggccgtccagccgcgggtccgaaagggtcgtcagccgccgccgacgcctcctggtcggatatgtggcaaaatttgggctccttttcggcgggcgattccaccgacagtgggctggtgctgcagaatctggtgcagatcgaagactcgaaagcgaccgcgtacgtgatgccaaacaggacgatcttctgcaagccggagctgctgtgcgatttgggctgcgagacgccccgcatctactacgagcggcatctcggccgaccgtaccggtacttctacgccatcagctcggacgtggacgccagcaacccgggcacgctgatcaaggtggacgtggtgacgaagggcaagctgacctggtgcgaggagaacgtgtacccgagcgagccgatctttgtgcccgcgcccgacccgcagtccgaggacgatggggtcgtgctggcggctatggtgtggggccgcgaggaacagaaccgggccgggctgctcgtgctcgatgcgaagagcttcaccgagctcggtcggtgcgagtttgtgacgcccggtcccgtgccaaagtgtctgcacggttggttccagccgacggccaccaccaccaagggagactaatggacaaacatggcattatgatgagccaattggcaagattcccccaaagaggcatacgcaagatgttgtagataggctgtatagcgcagcgatagcagattattagcgaacggtttgagaagtattacggcatcacatgaaagaaactgaatattattaattaatcacgaacacgatcgatcgatggcggaagtagttgggccacctttccccactccccgtaaatggcatgcttcccgggctgcccaaaaaccccgggaggagtgtgtgctaaagcgctgtgctacctgttatttgttattggaactgttatcacaaacggttaacaaactataaatataatcaaatgttgatgttttgaataataataaaaacgcgtctacgatccggctttcgcttaatttgtaacaacttgcaccccccagcgggaatggcagatggaaaagta

SEQ ID NO: 299 - DNA, 513 bp, Aedes aegypti
atgcggtggtggtgcggtacgtacgagcgtccgagcgccgagtgtcgccgagagaagccggtggtgcgcgtgcctccgggtgagcggtgcagcagtgtcctcagaataacaaacaacctggtaacgtgccttggggggccatggctcggcggggccgtcagggaggacgacagcttcagccatcaggcgcacgttcgacctataagcatcttcatcgttctggcgaacattcaaatccccccagtggaatctaccgttttacggttaatcaccgaagccctccaaaacaacatcgccggcattccgttgatccacaaaaccgaagagttcgacttcgacccggaagtgagccaaaaacgacgagaattgtactacgagcaacacggatatcgaggagagaaggccatagagcgactgggactcggcatcgatggcaagcatcgggagcgggcagcccaacagcgagcacgtgacgaaggacacctgaatgggttgaacgatcaccagccttga

SEQ ID NO: 300 - DNA, 435 bp, Culex quinquefasciatus
atgacaggaaaattcatccgagagcgaatctctgacgcgtcgcgtttcggacatccgagaagagccatcaaccggtgcgcgaacttgcctgaagaacgtgctctaacgccgtcgttgttgtatctcgccaccgtgctggtgctctccaacatccccgtccgccccgttgaggccaccgtcgtgcggttgttcaccgacctgctgcaaaataacgtggccggaattccgttgattcacaaaaccgaagagttcgatttcgacccggaggtcagcaagaagcgccgcgagatgtactacgagcaacacggataccgtggtgagaaggccatcgagcggctcggactgggcatcgacggcaagcaccgtgaacgggcggaacaccaaaggcaacgggacgagggacatatcaacggactgaacattctgcagccttga

SEQ ID NO: 301 - DNA, 327 bp, Anopheles gambiae
atgaatttgcttgtacagatgtgtcttatcgtgctgttggcttcggtggagcatcgtgttgaggccaccgtggtacggctgttgaccgacttcatccaaaacaatgttgctggcataccgctgattcacaagacggaggagtacgacttcgatccggagataagcaaaaagcgcagagagctttactatgagctgcatggctaccgtggcgaaaaggtaatcgaacggctcggtcttggcattgacgggaaacatcacgaacggctcgcgtttcaaaggcagcgcgacgagggacatctgcagggccttaactatctgcaaccatag

SEQ ID NO: 302 - RNA, 9 nt, Artificial sequence
  oligonucleotide sequences that can be used to form the SiRNA loop
uucaagaga

SEQ ID NO: 303 - RNA, 9 nt, Artificial sequence
  oligonucleotide sequences that can be used to form the SiRNA loop
uuuguguag

SEQ ID NO: 304 - DNA, 500 bp, Aedes aegypti
atggcctcaaagccagtcctgagcacgaagactccaataacggagctgcaagagctgtgtgtgtccaaaaaagcgccgcatccgctgtacacatttaccggtgaggaaatcgacggaggaaacccgaattccaaagttttcaccacttcggttttggccctcggattcaccagcagcggaattggccggtcaaagaaggattccaaacatgacgctgcctataagttgttgaaattgctgttcgagaaagggctgagcgatattgacgtggacaatgatgagcactttttggcggtcctgtcctcggataaagtgaccgaagtgcgggacatttgcgtgcagcggaacttcgagatgcccgaattcaactgtgtccgcagttcgggaccttcgcatgctccagagtttgaatatgagtgccgcatcggagcgattgtccgccggggaattcacaagacgaagaaaggggccaaacaggcagcgtgcaacgagatgattaa

SEQ ID NO: 305 - DNA, 7845 bp, Aedes aegypti
aggaccaggatttcaatgtttgtctccttgaactctagcggagactaatgaattcctcctcctggacctaataagggcatgtcgacagggggtcgtaatggttataacacggattccagatgatttgaaacagaatttaaattatttaagagggtatataaaagcacacaatctgctagtttgagattatttttattctcaaatgtagaaatgcagctttaagatttcatatgaaatctgtaaatttatcagcacaaccatacatgtttgctccttcgctcgaccttcagaaaaaatagccacggtccggttcgctcgtaataggcaccgtgccaaatttagccgaatttgcgccccctaatttccaattacactgcccagtttaatcccaacactttcgctaatgaaatactataaatcaatgaatcaacttcccaacgcacatcgcgcgtaccagcccccgtactccagtgctggaaaagttcgcatcacggagcagctcacgagtgtataccaacgcataacaaacatcacagactcgggatctggctaggtgtgagtaagcccgcacccgtctgctcgggagaacatgtcaaaagaagtagcaacaagctcgcgagcgtttactcgcgagtaaccgagcaaggtgtgatttattatggttttgacagacaaattaatggtataaccatcatatcgatagtaaactactagtttgtagtcaaaagcccccgaaaaccataaatctcggagggtaagcagcttttttcccaaaagcacaatatgactctgagcagctccgaacacgttcacgaatcactttttgcttcagttactcgggagtcgacagatgcgagtaagccagcgctctgacgctcgggagcgtttggttttgtttttgttccagttcagatgaagcgttcgctactttccatcactgccgtactcacacccatgcaccgtccaattatctattttttactcatttcttctaccacttttcctcttcctctcttacagacatactccggactgttctgcgtggtggtcaacccgtacaaaaagctgcccatctacaccgaaaagatcatggaaaagtataaaggcatcaaacggcacgaggtaccgccacacgtattcgccatcacagacaccgcatacagatcgatgctgcaagatcgagaagatcagtccatcctgtgtacgggcgagtccggtgccggtaagaccgaaaacacaaagaaagtgatacagtatttagcgtacgttgcagcatccaaaccgaagggatccgttgcgccgtcgccagcacttataattggtggtcactcatcaagcctatcgggagaactggaacagcaactcctgcaagccaatcctatcctggaagccttcggtaacgccaaaaccgtgaaaaacgacaactcgtcgcgtttcggtaaattcattcggataaactttgacgcgtccgggtacatctccggtgccaacatcgagacgtacctgctcgagaagtcccgtgccattcgccaagcgaaagatgaacgaacattccacattttctaccagctgctggccggggcctcgcccgagcagcacgacaaattcatcctggacgacatcaagacgtatccgttcctgtccaatggtagcctgccggtggccggcgtcgacgaccacatcgagttccaggccacggtcaagagcatgcacatcatgggcatgaccgaggaggacttcaactcgatcttccgcatcgtcagcgcggtgctgctgttcggttcgatgaagttcaaacaggaacgcagctccgaccaggccaccctgccggacaacacggtcgcacaaaagatcgcccatttgttgggtctgagcgtcacggatatgaccaaggccttcttgacgccccgaatcaaggtgggcagagactttgtcaccaaggcacaaaccaaggaacaggtcgaatttgcggtggaagccatcgcgaaggcttgctacgagaagatgttcaagtggctggtgaaccgaatcaaccgatcgctcgatcgaacaaagcgtcaaggcgcttcgttcatcggtatcctggatatggctggtttcgaaatcttcgagctgaactccttcgaacaactgtgcatcaactacacgaacgaaaagctgcaacagctgttcaaccacacgatgttcatcctggaacaggaagaatatcaacgcgaaggcatcgaatggaagttcattgatttcggactggatctgcagccaacgatcgatttgattgacaagccaggcggtatcatggctctgttggacgaagagtgctggttccccaaggctacggacaagacattcgtggaaaagctggccaccgcccacaccatgcacccgaagttcatgaaaaccgacttccgaggagtggccgatttcgccgtcgtgcattacgcaggaaaggtcgactattccgccaccaagtggttgatgaagaatatggatccgctgaacgagaacatcgtttcccttctgcaaggttcgcaggatccgttcgtggtccagatctggaaggatgccgaaatcgtcggaatggcccagcaggcccttaccgatacccagttcggagcccgcacccgcaagggtatgttccgtaccgtgtcccatctgtacaaggaacagctggccaagctgatggacactcttcgcaacaccaacccgaactttgttcgttgtatcattccgaatcacgagaaacgcgccggcaagatcgatgctcctcttgtgctggatcagctacgttgcaatggtgtcctggaaggtatccgtatctgtcgccagggtttccccaatcgtattccatttcaggaattccgacagcgttacgaactgctcaccccgaacgtcatccccaaaggattcatggacggtaagcgggcttgtgagcagatgatcaaggccctcgagctagacaacaatctgtaccgtatcggtcagtcgaagatcttcttccgagcgggagtgctggcacatcttgaagaagagcgcgactacaagatcacggacttgatcgtcaacttccaggcgtactgcagaggattcctggcccgccgcaactatcagaaacgcttgcagcagctgaatgccataagaattatccagcgaaactgtgctgcctacctcaagctgcgcaactggcagtggtggagattgtacactaaggtgaagccattgttggaagttaccaagcaggaggagaaactggtccagaaggaagacgaacttcggcaaattcgcgacaagctggacaatctgtccagaagctcgcaagagtacgagaagaagttccagcaagcgatagaggagaagacgcatctggcggagcaattacaagcggagattgaattgtgtgccgaggcagaagaaggtcgggctcggttggctgctcgcaagcaagaactggaagagctgatgcaggatttggaagcgcgcattgaagaagaagaagaacgtgtaaatgccctgtcgagtgagaagaagaagctgcagatcaacattcaggatctggaggagcaactcgaggaagaggaagccgctcgccagaagctgcaactggagaaggtacagttggatgctaaattgaagaagatggaagaggatgtggccttaacggaagatcagaaccagaagctgctgaaggagaagaagatcctcgaggaacgtgccaacgatttgtcgcagactcttgccgaagaggaagagaaggccaagcatttggccaagctgaaagcgaagcacgaatcgacgattgctgaactggaggaacgtttgctgaaggatcatcaacagcgccaggagtcggaccgctccaagcgaaagattgaaaccgaagtggcggacctgaaggagcagatcaacgaacgtcgcatgcagatcgaggagatgcaacaacagttgatcaagcgcgaagaggaactggcccagacgctggttagaattgacgaggaatcggctgcgaaggctgctgcccagaaggcgcaacgcgaactggaatcccaactggccgagattcaggaggatctggaagcagaaaaattggctcgttctaaggccgaaaagcagaaacgtgatctgaacgaggaactcgaagcgctgaagaatgaactgctggactctctggataccactgctgctcaacaagaactgcgctccaagcgtgaacaggaggtggccacgctgaagaaaaccttggaggacgaatccgccaaccatgagggccaggtgtccgacatgcgccacaagcatgcccaggagatctcttccatcaacgagcagctggagaatctcaagaaggtcaaaggtggcttggagaaggcgaagcaaacgctggaggctgaaaatgccgatctggctaccgaactgaggaacgtcaaccaatcgcgccaggagaacgaccgccgtcgcaagcaagccgaaacccaaattgccgagttgcaggttaaattggccgaagtggagcgggcccgcatggaactgcaggataaggtaacgaagttgcagcaagagtcggagaacattacccagcagttggacgacgccgaactgaaggcttcggcagcaatcaagagtgccagcaacatggagagtcagctgacggaagcgcaacagctgctcgaggaagaaactcggcagaagttggcgctgagctcgaagctgcgacaactggaaagcgaaaaggaagcccttcaagagcagctggaggaggacgaggaagccaagaagaactacgagaagaagctggccgaattgaattttaccatccaggagatgaagaggcgttccgaggaagattccgacattgccaaggaactggaagaagcgaagaagaagatgaacaaggacatcgaagtcctgcaaaggcaaatcttggaactgcaagctaccaacgatcggctggataagagcaaaaagaagatccaatcggagttggaagatgccaccattgagctggaaacgcagcgcaccaaggtgctagatttggagaagaagcagaagaacttcgataaggtcctcgcagaagagaaggccgttagcgagcagcacgcccaggaacgcgatgccgctgagcgagaagcgcgtgaaaaggaaaccaaggtattgtcgctgacgagggagctggacgaagcgtacgaaaagatcgatgacctggagaccaaacggaaggcactgcaaaacgaactggatgagttggctaatacacagggaacagctgacaagaacgtgcacgaactagaaaaggccaagcgagcgttggagagtcaactggcagaactgaaggcacagaatgaggaactggaagatgacctacagctcaccgaagacgctaagctgcgattggaggtcaacatgcaggcgttgcgggcgcagttcgaacgggacgtgcaggccaaggaggaacaatccgaagagaagcgacgtggtctggtgaaggctcttcgggatatggaagccgaattggacgaagaacgcaaacagcgggccgctgccgtagcagccaagaagaagctcgaaggtgacctgaaggacattgaagccaccttggagatgaacaacaaggtcaaggaagatgctctcaagcaggccaagaagctgcaagctcaggttaaggatgccatccgggacgccgaggaagctaaggccgctaaggaggagttagcggccgttagtaaggaagccgaacgcaaagcgaaagctctggaagcagaagtcatgcaattgtcggaggactttgccagctcagaacgagcaagaagggcagccgaagcagaacgggacgaactgctggaagaaatcaactccaactcgaacaagggctccctcatgattgacgagaagcgacggttagaagcacgaattgccaccctcgaggaagaactcgaagaagaacagtccaacgccgaactgctggtcgatcgcaaccgcaaggcacagattaccatcgaacaaattaccaccgaactgcagtcggagaaatccaactcgcaaaagttcgaaaacgtcaagaccggcctggaacggcagaacaaggaactgaaggccaagctgtccgaactggaaaccgcccaacgcaccaaggtgaaagctgccatggccagtctggaggccaagatcgccaacctggaggaacagctggagaacgaaaccaaggagcggctcggagggcagaaggcgaatcgcaagctggagaagaagatcaaggagctgacgatgaacatcgaagacgagaggcggcacgccgaccagtacaaggaacagatcgagaagatgaacaaccgtatgaagatcctgaagcgaaatctcgacgaagcggaagaggaaattcagaaggagaagacccagaaacgcaaggcccagcgagagtacgaggacatgcttgagagtcacgaggcgctgacgcgggaagtgaactcgcttaaaacaaagctgagacgcggcggtctcggtgtgagttcgacccggctgacgacaccgaagcgcgagaacgactccatggtccaggatgagtcgctcgacggcgaggacaacagcaactgacgactgccgagtacgtcttccaagtatctttccaacttttattagccacggaaagggtgagggaggtatgtaggtgaacaaaagaaacgaaaccggaagcatgggtgggagagaagtttcaggcacaatcgcagcagcaaaaaaaacgagattgagaacgaatgagagcgagtgtctttttttaaactgtgaaaataaagaaaaaaatgcgaatgtgcgacaaaagttgagcgatgcaaaaaaaacgtgaaactattggtagggaaacccattcattgttgtattaaatatttggataaaatcttattgaagtggggtcggtttctgtaaggcctaccctttttgcatgtatttaggagaaagtttatcgaaatagcagacagcggaggagaagagaacacagcagtaatgaaaataaggaaacgtatttagcgaataagtaatcaacattttcctaaatcaaaacaagcaagtaaaacgattaaaacctaaagcaagcaaaacgtagaccgatcattagaaaacttcataaaaaataccatttcatagaatctaccattataccggtaatgtatcgaacttacacaagtgaagcaaattcaatcattattgggcgaaacatataaacacaaatagcaaacagcaatctagcagcagcagcagcagcaaacggaagaaaacgaatggtgggacatatttttttacaaaatcagtatgttttattgctttcaaaatgggagaacagaaggatacgaatcaacattaacaattgaaccgatgagcatttaaatacgtttatatatgttacgaaaatttattgtttttaattattattattaaaataattaatgcctatttctctactattatttgtcgtcgtcattaagtttttcgcaacttatttcctcttttttatctatttcatttttgcgcgattatggtcaagatttacttatatattgaaacgcaacgcaacagacaacagactcgtacactctcagatacggccaagcacgatacaattccatttctaatagcacacacacacatacacattcactcgtacatacagaacacggtatgtttgaagagaacatgcctctttccggttgatacagagaaaagaaaatgttttaaaaacgacaggaaaaaccacgctgtatctgcttaagtaatgttcgctttttatattgattaacaagaaacgtctctagttgaaacagaaaaatccgttaaataataataaaaaatattgctattgaatat

SEQ ID NO: 306 - DNA, 567 bp, Aedes aegypti
cttcaacagatcctcaacatggaagacgacatgaattggtaccgagcggaactagacgggaaggaaggactaataccaagcaattacatagaaatgaaaaatcacgattggtactacggtcgcatcacacgggcagacgctgagaagctcctgtcgaacaaacacgagggcgccttcctgatacggatcagcgagtccagcccgggcgacttcagcctgtcggtcaaatgctcggacggcgtgcagcacttcaaggtgctccgggacgcgcaaggcaaattcttcctctgggtggtgaaattcaactccctgaacgaactggtcgactaccaccggacggctagcgtgtcccgctcgcaggaggtcaaactgcgcgatatggtgccagaagagatgttggtgcaagccctgtacgacttcgttgcgcaggagtccggcgagctggacttccggcgaggggacgtcatcacggttacggatcgctccgacgagcactggtggaacggcgaaatcggcaatcggaaaggactattcccagcaatatacgtggcgccctaccattcataa

SEQ ID NO: 307 - DNA, 9396 bp, Aedes aegypti
atgtcgctacatcgtactccaccaagtgacaagagcaacgaaaacattgctaagcgcatacgatcggatggcgatgttcatgaagtcccccagcctttgacgttggaggccgtaatgcaagctatgaaccatcagtttgcgcagacactagcacggatcgaggaaattagtgtcaacatcagcggaaaaatagacacagtaaaagctgatctagataggaaacttgaagctgttctccacgacatcaactccttcaaggcggactgcaatgctaagctcaaaagcaacgaagatgcactgtttgctctcgacgaaagagtgggcgctatatcgcaggatatcgacaatctccaaaacaggaacgagctaattgtgagtggtatcccgtatctcaaggacgaaaatctgatatcttatttcaacgcaatgtggaagtacttagatctgcagaagggatccattccatctgtcgacgtacggagattgagaccgagcactcaaaacgatggtctaattgtattacaatttgcgctacgaaatgaccgtgacgacttctacagcggctatttacataagcgagatctaaagctgtgccatctgggaatcgattcttcaaggcgagtttatgtgaacgagaacctgactgtcgctgcacgcaaaataaaggcaacagcattgcggctgaagaaagctgggaaactatcaacggtgtacacgaagctggggacagtcatggtgaggcgttccgtcgatcagccgcctgtggccgtgcactcggatgtatccgccaccgatccggactgcggcgtcaatgcgatggtaaattacaccctcggcgagggctacaagaagatcaccgagttcgagatccgctcgagcaccggcgaggtctgcatcgccgccgagctggactacgagacgcgcaattcgtacgagtttcccatcatcgccaccgatcgaggtggcctcagcacgacggcaatggtcaaaattcagctaaccgatgttaacgataaccgaccaacgttctaccctcgcgagtacaacgtttccctgcgtgaatccatgccgacgaattcactcctatccaccccggtagtggtgatcgtggcaaccgattcggactcgggtagctttggaacgatcagctatcgtatcgtggctggtaacgaagcgggcatcttccggatggatcggttgaccggagagatcttcgttgcccgtcccaacatgctgtcgagcaggagtcaaccgtaccaccggctgaacatctcggccagcgatggcggaggtttgcgatcgacacacgatgcagaggtgttcatcagtgtgatcgacgccacgcaaaggccaccgatcttcgacaagccacggtacacgtactacgtcaaggaggatgtcaagaagaatacggttgtgggaacggtgtcagccactagtagcaactcaggaagccgaggttccatccggtacttcatctattcaggagatccagacgggtactttgcaatcgatcccgtttctggaaacatccgcgttgcaagcactctggatcacgaaacgaagcctcaagttctgctcaatatccaagcgaccagcggcgatcctccagcctacggtcacacccaggtcaacatcgatatcgaagacgtgaacgataatccaccggagttcgaatccagcacggttcggatatcggtcccggagaacgtcgaaatcggatctcctctatacgcagccaacgcacacgacaaagactccggaatgagtggtgtgatcacctaccggttaagcaacaacgggcctgcaacgggtaatctcttcagcatagacagccgtagtggtcatctgagcttggcacgtcccctcgattacgaaaccgttcaacggcacacgctgattgtgacggcttcggattctgggataccgtccttgtcgaccaacctcactatcttggtcgaagttcaggacgtcaatgacaatgcaccggtatttgaacgtagcgaatatgcgatcaaggtatcggaatcaacgcccagtaattcacagatcatgcaagtaacggcagtggacgccgacaccggaaacaacgctcgactcacctaccggattctcggggatgatcaacgaacgcgcacggggaaatcctcttcgaaagcctccgaagcaaacactccggagattttcggcattttccccaacagtggctggatctacctgcgcacaaagctcgatcgcgaggaccaagagcgctacaacattacggtgatcgtcagtgataacggagttcccacgttgaccgccaccactcacgtgatcgtcagcgtactcgacgcgaacgacaacaacccgatcttcgccaagcaactgtacgagttccagatagaggaaaacatgagacgaggatcggtcattgggttgataacggctacggacgcggatgcaggcatcaatgccgtggttcggtacagcttgattccgagcaacaccagcttccagatcaacccgatttccggtgaaatcacaacgcgagacaggctcgatcgggagacgaaatccatctacgacctcgtggtggaagcacgcgatcagggaaccccctaccgcagctcgcgcgtttccatcaaaatcaagatcctcgacgtcaacgacaactcgccggagatcgtcgatccgcaggaggatgtggtgagcgtccgcgaagagcaaccgatcggcaccgaagtggtccgcgttcgggcgatcgatcgtgactacggcgtcaatgcgtcgatcacctattcgattctgaagggtcgtgactcggacgggcatggtatgttcacgatcgaccccatcaccgggcttatccgcaccaaggcatcgctcgatcacgaggagaaaacgatttaccgattggcagtggctgccaccgataatggaaaacctccgaggcaaaccgttcgcctgctccggatagaagtgctggatttgaacgacaaccgaccgacgttcactagctccagcctggtctttagactacgagaggatgttggcgttgggcacgtcattggctcgatcagtggcaacgaacagtccgatctggagaatctcatcaccagttcaaacgatcttcacatcacttacacgctaacgcccctaacgaacgatattgccgagggagctttcgacattgatcgcaactccggcaagctggttgtcgcgcgatcactcgatcgtgaacaacagagcgagtatcggatggagatccgtgcgttggacaccagtgccagcaacaatccgcagagttcggccgtaacggtgaaaatcgaaatagccgatgtaaacgacaatccaccgaagtggcccagcgatcccatgaacgtctacatttcggaggatgccgccgttggttcagtggtgttcaacttcacggccactgataacgactccggaactaacgctgagatcaagtacaatatttccaagccagccacggcgcaaaaggagtttttctcgatcgattcgctaaccggttcgttgactctgctggctccactggattacgaagaaaccaaagaattcctgctgattgttcaggcgacagatcaatcgtcgaacgttaccgaaaggatgacaacgtcggccaccgcccgaatcatggttaccgatgtcaacgacaattcgccgaaatttgtagttccgcaagctcaggatacaaccgtttacgttagcgactccatggaggtgaatcatattgtgtcgcacgtggtagccatcgatcgcgatagcggtgagaacggtcgcgttgtctacaaaattgtcagcggaaatgaagacgaacgatttgcgattgatcctgataccggattcgtcaaactggcgaaaccgttcagcagcaatttcatcgctgacaactccaagaattcgattaccggtcggtacaatttggtgatcactgcaactgatcaaggtacccctcgttccaaagaagccaagatcaccattcaagtggtgattcagaacaccagcaacaatccaccgagattcttggagtccgtctaccacatcaacatcacggagaacgtcccaaccggaagctttgtcgttcgagtttcggccaaatcttacaacgacaacggtaacgcaaatctcacctacgagattccgaaaggagtgggggatgatcactttgtagtcgattcggtacgagggatagtgaccactcgaggaacattcgatcgcgagtccaaggacatgtacactgtgccaatctacgtgacggagcagaaccgcttcaaaagtgctgcctccggaacaagtaaggacatgagccagtttgacgtcgctacgttggtggtgaggatcaccgatgtgaacgatcatgctccggagtttcttcctggatcgtgctatccattagccgtaccggagaacagtgaactgtcagtgattcacacggttgtggcaagcgacgcagatgaaggactcaacggagagatcacgtacagcatttccggaggcaacatcggcaacaagttcagcatcgatatgaacacgggcgctttgacggcccgtccgctagatcgggagatccacgcacggtacgtcctgcagatcacggcacaagatcgaggatcgccaacgtcgcatcagggccattgcaacattaccgtacgcgttgaagacgagaacgacaacgatccgaagtttgaactgcaaaagtatattgcaacgatcgacgaagacgctccgatcggtacgaccgtcctgacggtgaaagccgtggatgcagatatcggtatcaacgcgaggatcgtttactcgttggccaatgttaccgaatggctgttcgatatcgacagcaaaagtggcgttataacgactgctggacatttcgatcgtgagcggcaaagcatctacaacttcatggtagtcgcaacggatggcgggcgatacaacgcccgttcccagagtgtccaggttcaagtgatcattgcggatgtcaacgacaacaaaccagttttcgacaagtaccccttcaaggaacaaattggggctttggttcaaccgggacagactctgttgcacatatctgccaccgacgtcgatcaaggcagcaacggagagattgtatacagcttgaacgacaatccgaacaatgccaagttccggatcaatccgaatacgggagctctcagtgcgacgcagtccctggccagtgaaaacgggagactcttacatatagaagtcactgctagagacaagggaaaccctccgcaagttgctactgggttgatcgagcttcgcgtgggagatcttcagcaagaacttccggcactcaagttccagaacaactcctataaagtgaacttggttgaaaacacaccgatcggtcaaacagtgcttcacctaaatgcagttcgcagcgacggtcgtcgacagaagatcatctacagctttggatcgggcaatgaggacggtacgttttcgatcgacgccgttaccggagaagtgaagatccgtaactcgcacaacctggattacgaacgcttcagtcgtctgaatacggaaggaattgatcttgtggctgttgccagaacggacggcagtcctctgttgtacggatattgctcgatcaaagtagtgcttcaagacgaaaacgacaatgcacctcggttcacgcaacagcagtactcggcatcggtttgggaaggcaacaacaagggtgaattcgtgatcaaagtgaacgctttcgataccgatcagggatcgaacgctcacattctgtaccacatcgtagacggcaatcatgacaatgcgttcatcatcgaacccgcctttagcggaatcgtcaaaacgaacatcgtgctcgatcgggaaattcgcgacaagtacaaactgaaggtgatcgctaccgacgagggagttccgcagatgaccggcactgcaacgatcaacgtcaatgtggtggatgtgaacgacaatcaaccgactttcccacccaacagtgtgatcagtgtcagcgaagctacaaccgttggaactgtattaacgtcgataacggccaacgacgtggacaccaacccgcccctgacgtacagcttcggagacagtccggatgaggacgcgaagtcatacttctccatcgatcgctacagcggaaaggtgatcctgatcaagcccttggactacgaagcccgccacgagttccagttgaggatcttggcgtcggactctgcccacgtagctaggaccctgctgacggtacgggtaacggacgtcaacgacaatccgcctcagtttcagcagatcacctaccatgctatgttgaacggtacaaacttccctcgtttcaaaaatccaggtacacattctaatatttctttttctcttataacagacgacaccgacagcaacagcaatatcgcgataatcgcagtcaacgccacggacagtgacagcgagaacaacgccgccatccggtacacgatcattccgccgtcaatcgggtttgcgatcgacgccctcaccgggcagctgttcgtcaacatgagtcaggtacatcgaacccgttctggaacgctatacctcacgatcacagcaacggattccggcgtcccaccgctaagctcatcaactacggttaggttagagatgaagtccaagagtaaggccaatccacactttatccagagccagtaccggctatcgatcaacgaggacgccccgacgggaagcgtaatcacaaaccttatccccaaggctatcgccgagcaggtcgatgtaagttcgagcattgcgtttgaaatcatcgacggaaacgacgataattgctttgagatttcctacccgtcaggcgcaatccttttggtgaagtccctcgacagagaaaagaccgattactacgaactacgtctggttgtcaccgaacccggggcgaccatgatgtacaaaggtatgaacatgtcttcggctatccgggtaacgatcaccgtagaagacgccaatgacaatgcacccgagttccagccgggtccgtacgaagtggcgatcagcgaaacggctccgatcaagtactcgatcggtcaaatatcggccgttgatgccgatctgctgaattcgccgaactcggaggtcgtgtaccagattgtgtccggtaacgatggaggttggttctcgatcgacttgatcacaggcttgctctacatcaacaacaatctggattacgatcgcggacctacgcagttcaatttggtgattcgggcgtgcgacagccatgttctgccaaagtgtagcgtccatcctttcgtgataaatttgactgacgaaaacgataacgaaccgcagttcccagttccggagtatctggaattcgtgggggagaacgaaccgattgggatcagcatatttacggctcgagcaaccgatatggatcggggagagtacggccgggtaaactactcgattgacaacgcgatgaccagtggttactccagcgttgacgacggttggaaactgttcaaggtggattcggtttccggtgtgatcaactcgaatgcggtgttcgattacgaggagaagaatcgatactcgtttacgctgagagctacggataccggtggaaagtcgaaaaccgtgaaggttcgcattatgatcgaaagcagggatgagttcagtccacagttcactgaaaggacgtaccggtttatcctgaagacgcccgatacgggacatctgccagttgggtacgttgttggacacgtgactgctacggatcgcgatcgaggacctgatggaagaatagtgtatcagttgaccacgcagcatccgtacttcaagatgaatcggacaacgggagccatcttggtcaagaagaagttggatgacgtggcggcatcgttggaagctggcagggacattagtttggtcgtgacagccagttccggacggcaaggatcgcttacgaacatgaccgtagtggagatttcgatcgacactcttggtcatatgaagggaggtggtgaaggcggcggagactacggaagctcggagtccgtatcagcgagcaatggattggctaattgggcattgggcctgttgatatccatcttgctagtggtcatttgtgcagcgtctgtgttcttattcttgcacatgagaaatcggcagcagaagcatgtgaacaaatccggtttgagtacggagtccgtgggacattcgaacaactacgtagatccaagcgctttcgataccattccgatcagaggtagctctagcaatacgaacaacgctggtcagtttgctcccccgaagtacgacgagatacctccgtacggagccagttctaattcggggaatgcgacgacatctgaactttccggatcagaacagtcgggatcgagtggccgaggatccgcggaggatgacggtgaagatgaagaaatccgaatgatcaacgaaggtggtccacttcagagggatgccctgcagctggatggaagactttcggatgtttccgtacaaaatactcaggaatacttggcaaggctgggaattgtagataacgccactacaggcaatgcttcgaattcctcgcgaaggtgttcggaaagtattggactgggtagctccaaagatgctatgcttcatcacactctgccgatcgatacgttgcatatgttcgacgacgaacaccgggagtcagatctgacgaatctgatctatgccaaactgaacgacgtgacgaacaacagcgatcgggcgagtagtgtagatgaaacagtgaccaacgcaggcagtataggagccgccgttgatcacgtcatgatgggcaactacggagatgtccccgtggtcggtggacaacagggcatctccatgaacggttccctaagctcaattgtacatagcgaagaagaactaacgggtagttataactgggattacctcctagattggggtcctcagtaccagcctctggcgcacgtcttctcggagattgcacgcctcaaagacgacactctctcggttcacagtggaaacagtgggacttcaagtgccaaaagcaaaaactcgctccatcacaccgtcaagaacgtcccacctccactgctaaccaacgtggcaccacggtctatcaatgtcccggtgttttcggcccggggcaccagtagtcaccatggtcaaccacctaatcaatatctgctgccaagatcgcccataagtcacgactcggcagcaggcttcagcacatcgtcagccatgtcacctagtttctccccttccctttcccccttagcaactcgttcaccgtcgatttcgccccatgtggtctcgaccggtgtcccaacctcccatcacatggtatcgttaccaaggcctccacagcaaagaggccagcggaaaccttactga

SEQ ID NO: 308 - DNA, 750 bp, Aedes aegypti
atgacttttgcattcaacatcatccaagcacaactcgctggaatggactgcaatggaaacacctacttctgcgttgattccgacaactaccaaatttgcagtgaccttcccgaaggaagaacggaaaccaccgacacaacaacctatccgtgccctccagatttattctgtgacaattcaggacgagctgaatgtgattcttcaaccagacctgcaacaaacatggagcctgttgatgaaaccttacctaacccttcccaatccgaaacaccttctgaaacttctgcagaagccgatcaagcaccagaagaaccctcctcgacaaccacaacgcctttgttctcttgcaaggaagcaggtcgctttccggacagtaccagttgccacaactactacatctgtctacagctgccccttggtcttagccaaattcacaccaactgcctctttggaatggcattcgatccgataacgctacgctgcagcagcgatcagagctcgtgtcaaacggattcgttctgtaccgacgagggagtgtttcctgatctgtccgaccgcagtggctacttccggtgcacttggaacggctccggctatgagaagtaccacatgaaatgtggtttagggcagagattcaacgaagcgcaggggaggtgcaccttgttcgggctacgtgcgggtggcgctgagcaaagtgaatctcccatgcgagacttcatgcgggtgcccggtagaggaggatacaactag

SEQ ID NO: 309 - DNA, 1191 bp, Aedes aegypti
atgtctacgcaaagaacgccaccgtttcagctaatgtccgcctcgttaaaactgtgcaagtggtttggactttggaacgagtccaatctgaacagaccctgttggcaaaccgtattcgtcattttttgtctgctcttttggtacatactaccaggatatctgtacattgcacgtggcgagaaaacgcttcagactcttctgaagcctattatagagatttttgcgatgtccgtaattacgattaggtgcatctatcacatattcaaccgtaagaatctccaagagtgtttcgttgatcttcaagaagcaatatccactttcaaaaactgtccgtatgaagacgtccgacgaactttgaaacatttgcataaatcagcccactatgtcgtcaagatctacgtatccatcgtgttcatccaagccagtgtctatggagtactagttcccgctgctcttatcacttaccagtattgtacgtccgatgagatgatccaattaccatcagcggtgatggacgcagactatgtactgttcgaccataccgtcaactactggaattggatactggtgacgttcgtgtcggttatcgtacaatatctgatgttaggatctgtatcagctcaagagtgtctcttctggaatctactacatcacgtatcgtgcctgttcaaaattgttcgcttggaaatagcccgactggaccaatacacagatcctaaccagttcacagaacgattggcaagcattgtgtccacacatgaggtctgtttcaagtgcgcacgttgcttggaaaatgtactaaaccctctgctggcattatggtattgtacctgcatagttcaaacgtgttatttgctgtttgtcgtcagcatgatcgatgacatggtcgtaatcgcatcgatgatattcgttctgcagtataccatatttctcatattttcgttctcaatgttgggagctgaactcatggaagagagcgctcgggtgtccgatgccgtctacaattcgaattggtacatgcgaatgcctgccgaaagacgtttgctgtggttcatgaagctgagatcggatcgaccggtgggcataactgctgtaaaattcttctacgtcaataggtctacttttgcggaggccatgaaaacggcgttttcacttttcactattatgcggcggttctacggagaagagtag

SEQ ID NO: 310 - DNA, 1336 bp, Aedes aegypti
cgtaaatcgtctcgtctctcgtctcgcatagtcgttgtcgttttcgtgcggttggctggctcgttatcctcgctatctggcttctggcagcagcagattgcctttttacaaccaggcagacagccctctgctcttcgtgtgtctcgccccgaatttggccttttcttatcagtagttcggccgttatcagtgtcgcttcgcttgtcgagagagccatcatcattttccgaaaacaaagctagaccggttccatctctaatttatcccccgctgttcctccatcgactttggctggccaattttcttgttttgttgtttgaacagtgtgcattatctttgagggagcagctaatgagtgaaagataaaccctctgccgcgatcaaagagggaagtagctggaagcaggcagccagcatgtcagaaagttagtagagttcagcctggcaggaaggattgctatttgatatcgacctctttttttctctccatcaatctacaatcaagacatcaagtatgaagtggacatgaagatggaaccgtccagtccatcggagaaggatcgcagcatgtactcgcgttgttcgagcgcgggcagtgtccatacgccaacctcatcggcacataactcagaggacgaagaggattccggtgataacaagagtagcacccagagctacaaggaacgtcgccgcgaagcccatacccaggcggaacagaaacgtcgcgatgccatcaagaagggatacgactcgctgcaggaactggtgcccacttgccagcaaaccgatgcctccggatacaaactgagtaaggcttcggtgctccaaaagtccatcgactacatcgggtttcttcatcagcacaagaagaagcaggaggaggaccgtgcgtcgctcaacaaggaagtgatagccctgcgtattatacagaagaactacgagcaaatgctgcaacagcagcagcagtctcctgggaggaccgaagcgcgcctgacggatgaagccaagttccaggtgctccgggccataatggacgaaatgttcgttacgttcgaccagctgccgatgaacgactttgccgagctgacttccggggtcattccgtggctggaggagcactgcaagccgcacctgttgcgcgatgtggtcaatcgcaccctcggtggaatcacctcccaatatgtggcgcagtccagcagcaaaggacacgatgttaagcgcgaataagggaatttggtgagttttatataattgcaatttgactgtagtgacgtctaattgtgtaatagaaaattggatattttaataaaggaaataccaagctacgcacagaata

SEQ ID NO: 311 - DNA, 1905 bp, Aedes aegypti
atggattccggcaccgagttccgctcgctggacgatgcattgaagaacctggaaccgatggtgaatcccgtccgacagtatcgtaatcggaagcaacaacaacagaagaagaagaagtggaaggaaaattacaatggcggagctacagaggaacaagtagatcacggaggggacacaaaactggccgatgtcctgagcaagataaccagtgtgagtagcagcgaaaaggtcgaccgaaccaagctgatccggacttacaacgtaaaactgcgcctcaagaaaccctgcctgtacaaatgcttcgattgtgacgtttgtttcacgaatgccgactttttggaactgcacgaaaagtcccacggcggaattacggcggacacgtcttccggtggatcgtcccggaacgaaatcgatctgcagcaggagcaatcgttggacgagtcggaaatgatcgtaaaacagaacgcttggttcgtcggggaagattttgacgaaagcgatgaacaaaatggcgatgatgatgaggaggaggaaggaacgatccaattggattgcaccgttgaggaacgggaggacaacttcgacatcacgttcgatcggaccaagtgcgagaaaacctacacggtcgtgaagtacaaggtccggaaggatccggtcgggaaatgcgaactgtgcgagcggttgttctacacggtggaaacgctccagcagcatcggttggaacacgaacggttcctgaactttgaggccatcgagccacagattgacatcgactcgccgagcatcgaagaaagcacgctggtgctggacgagagcttctatcgagccgaaacggaggacagtgatataatggagacgagtgacagtgctctggaggtcgctggcagggtggaatcaatccgacaaggtggattgcgtaacggtgagtggaaaccggcgactcgtccaggctcgccaccatatcggattcctccccgggaagaagtagcaaccatcgaagggcggttccagtgtgaaatctgttcgaggcgctttcgtttccgtccggcttacaacgtgcacctgcgaacccacagcaacagccggccgtttcagtgtgtcgagtgcagccggaggtttatttccaggacgaaactgtttctgcattcgtacggacacagccggatccgaagggcagcgttgcggtgcgatgcctgcggggccacgtttggtcgaccgcgtcaattgttggaacatctgcagcagagacacgagatgccagtttagaaatcagggggtgagtcatttttagccgttgttagtttaatttaaatccgatatcaagagtattgtaagcttagggaaaggctctttaaaagagctgattttttttagttttagtagagaaacacagcaatttaggagaaggtgtacacaatacaccaaagtcccgtggatggaatgttgattgcattgcgcttactcttatccactgttagtggaatttctgattgtaaatcatagcatcttagatgatcgcttgttgttaaaacaaaactacaaaactgccagtcgatatacccagctgtccgaatattaaactttatgtaagtaagtagttacgaaattgaactgggtagtaataacgagctgtgctattctgttttgttttttatgttatatttgccttctaaatatgaacatcaaacccatgtatgatagttattctaattctaatctactggtagtaaactggaattgtattaaattaacgttaatcaatgtgccatacgaaaataattcaatcatgatgtgatgagaacgcgcattcgttttccttcaattccaccaacttctgctccacttagaatttggtctaataaaattagtgaattctccaggagaagaaaaaacgtacacgtaatg

SEQ ID NO: 312 - DNA, 500 bp, Aedes aegypti
ttcgtgggttttagaggatgtaaaatgcaagtgttttattgattaaagcgaggaaaagctactaggatgctacattattcttctatgactagtgaaattaaaagccgaacgaaacgagatggagtgtggttgtgaaaaatatttagaggctcagcagccggccgatagcgatccggcttcgacgggaccaagtttcgaacagctggtggaacaacgagtggcctctacattgcaggtggtaaatgtcctcgttgccaaatcgagtgctcctcaagcggtgaaggatgccgtagtagctaacgcccaacaagagattggtgcctgtgcggcacaagccttggttgacagacttcccggaccgttcttcgcttgcagtggcctcgtgattagtaacgccagtaatacgctgaatgctgctgcctcatctggtgctgcgtcggtaaactgaacctatgtttgaaagcacagtaaattgaaacttgtgatatatacactgaatc

SEQ ID NO: 313 - DNA, 1353 bp, Aedes aegypti
ctcaccgcaaacgggattcccatccaaaatctggttccagctgtttggcgagggcaatggtcacgcgaatccctgtgtcgatcgtttattgattagcgcgttttgaattcgagtgccaatgaaacctcggtcaggaaacaggaatgcacaaaataggcgactaccagcggatcgagaagattggcgagggaacttacggagtggtgtataaggccaaagatgtgaacacgcagcgtgaaacggagggcgttccgtcgactgccatccgggagatttcgctgctcaaggatctccagcaccactcgattgtggaactgttcgacgtagccgtaatggattccagcatctacatgatcttcgagtatttggacatggacctaaagaagcttctggaccggcacaaatcctccttcacgccgaagcttgtgaaaagctacatgcaccagatgttggatgcaatcgcattttgtcacatgcaccgaattctgcaccgtgatctcaagccccagaatctgctggtggatcgtgaggggcacctgaagctggccgatttcggcttggctcgatcgtttaacgttccgatgcggacttacactcacgaagtggtcaccctttggtaccgggcgccagagattctcctggggaccaagttctacgcgaccggggtggacatctggagcttagggtgcatattcgccgagatgatactgcgaaggccactctttccgggggacagcgaaatcgaccaactgtaccggatattccggacgcggggaactccggacgaaagcaactggccaggggtgtcccagctgccggactacaagagaagtttcccccgctgggacgggcagtcggttcccgaggagatcgccctgcaccaggcgaaagaccttttcgagctgcttatggtttacgacccgacgaaacggatttccgcccggaacgccatgcagcagccgtacttcgacgatgtggaactggtgccaccggagattggacccttgaatggaaaaactaacggacagtaggataagagaagagtactggcacggggatgtaagtaacgtgatcgatttttgttgcatcttatcaactcaattcatagtggaaaaatcaatcacgtttctttcgtccttattctggcacacgttcgatatatgaatcacgttaggaattttaagggaagtcagtgaattttatgaaaaaggcttatcgtaggtaattcagggaacactcgaccacaaaagatcgtaaaactcctcattagcatagggtagaagcactagatttcgcccccctaaaccatgtaatcgcaggaataataaatttctgactctattaatcaatatc

SEQ ID NO: 314 - DNA, 1329 bp, Aedes aegypti
atgcacaaaataggcgactaccagcggatcgagaagattggcgagggaacttacggagtggtgtataaggccaaggatgtgaacacgcagcggtatgtggccctcaagcggatacggttggacagtgaaacggagggcgttccgtcgactgccatccgggagatttcgctgctcaaggatcttcagcaccactcgattgtggaactgttcgacgtagccgtaatggattccagcatctatatgatcttcgagtatttggacatggacctgaagaagcttctggaccgacacaaatcctccttcacgccgaagcttgtgaaaagctacatgcaccagatgttggatgcaatcgcattttgtcacatgcaccgaattctgcaccgtgatctcaagccccagaatctgctggtggatcgtgaggggcacctgaagctggccgatttcggcttggctcgatcgtttaacgttccgatgcggacttacactcacgaagtggtcaccctttggtaccgggcgccagagattctcctggggaccaagttctacgcgaccggggtggacatctggagcttagggtgcatattcgccgagatgatactgcgaaggccactctttccgggggacagcgaaatcgaccaactgtaccggatattccggacgcggggaactccggacgaaagcaactggccaggggtgtcccagctgccggactacaagagaagtttcccccgctgggacgggcagtcggttcccgaggagatcgccctgcaccaggcgaaagaccttttcgagctgcttatggtttacgacccgacgaaacggatttccgcccggaacgccatgcagcagccgtacttcgacgatgtggaactggtgccaccggagattggacccttgaatggaaaaactaacggacagtaggataagagaagagtactggcacggggatgtaagtaacgtgatcgatttttgttgcatcttatcaactcaattcatagtggaaaaatcaatcacgtttctttcgtccttattctggcacacgttcgatatatgaatcacgttaggaattttaagggaagtcagtgaattttatgaaaaaggcttatcgtaggtaattcagggaacactcgaccacaaaagatcgtaaaactcctcattagcatattacattattttaagcataggttagtggaattaaatggtacagtaaactgtgtcaattttacaaaaaaccgaaatcggcaatgtgcctctagtaaattatgctgccgtgaatcgcaagtcagtcgcatttgcattttcatcaaaataaagttgagttcatttttc

SEQ ID NO: 315 - DNA, 993 bp, Aedes aegypti
tgttcctcacaatactgggctgtttgaaattagcatcatttgtgcgctgtcctgcattttaacctgttcaaaattgtcataaagtaagaatctgcaaacatcatcaatggacaaaagcaaataccgtaaggagaacggtaattttatccgtcgcgttggaccgatggagctggaatcctacgctctgcacataatcaacaaggaaggccaaatgcagcggatcattaatccaccggaagacgtcatcggaatactgctgaacgaaaacgcagatgaccaagccaaccccaaggtcgagtttgtctactcgatcaaaaagttggcgcgtaagcatggaaagcccacgggaaaatcttcggcaaaatcgcacggaaaattcgggctgcatgactttgcccagctttttgccaattccgagaagccagctccgcgaagaggttttcccacgattaatcaactggccgccggtagagcggaagtgcagcttccaaaaaattggaagcaagatctgaacaagactatggatggactgctggatcaagaggcgcgcagaagatgggaagaactgtcgacgaatttatgtccgtgcaagaaaaaggagatcctcgagcaaatcaggcaggaacgcgaactaatcgagatgcaacgtattgtcttgcaagtcttgatcacaggttatgattcatacataaatatgcttctggagcaattggagcgtaacgatttggtgttggctttgaacttgggagaagggaaacgaggtgtatggtccttggagaagagaaatactcgtctgcttgggacgaagctgatctccgggaagaaagaattttggagaagttcgcctcaagattgagcattattgtataattctacatctatacaaccgggattttaatcactgacaagaaaatcaattgagttttacgatatatttttgtaagttcattagcattagtgcaataaagtggcgtcaataagtttcgtagactt

SEQ ID NO: 316 - DNA, 2051 bp, Aedes aegypti
agtatttaagtagccgcgttccggcgaaggtcagtagttgccgaacgcctcgacgaaaggagacaaaggattctggtggacttcgctgccgtcacctccaaacgatcaggattcgtagacagtcctttagcgcgtaaaagtccaggagccatggatcgttaatcaacgaggatcgcgtgtcgttcgtgtagtctaataacatagcgtagtcgcaaatctaagtcaaattgtatacttactagtgaacaacgaaatttagcatttgcgaaagtaacgcgaccttcacgagagcaatgaataaccagtggagattggtgctaagtgggcttttgtgtgtcctaatctgtgatattggaggagtgatcggcgcggcgtttcgatcgcccaacagtgatgatgccctcttctggcggcagcaggccgaatcctacctgaagcggatcctccagtacgaaccgaaccggaagagcggagcaggcgttgcgcggaacgtgatcatcttcgtcggcgatggaatgggcattgcgtcgctcagcaccgggcgaatctacaagggacaactggcggggcgatcgggggaggaggaggttctcagtttcgatcattttgagaactcgggcttttcgaagacgtacaacacggaccggcaggtaccggattcagctggtacggccacagccatgtttaccggggtgaagacgaagtacggatacatcggggtggactactcggcaacggctacgaacgaagtggcggcgagcgtttcaaatatcatggaatgggcgcaggccgtggggaagcgtactgggttcgtaacaaccaccagggttacgcatgcgactccggcggctacctttgcccattcgttcaataggaattgggagtgtgaggctacaattccggctaatgtgagaaacaaaaccaaggatattgctcgacagttggttgaaaatgctccgggaaataagatgaacgtgattcttggaggaggacgggctgcctttggagcgtcgattccggatcacttgaagacagcattcaagttcaatgggtctatggagaagaactgcgtcagagaggacggtcgtaacttggtgaaagattggttggtcagtaaaaatggatcggcggcgacctacgtatggaacacggccgagttgatgaacgccgaggtagatgacttagactacctcatgggactgttcgccgatacgcacatgtcatacgaacgccttcgggatacgagtgaagcaggagagccttcactagccgatatgactgagaaggccatcagggtgcttaaacgaaagcattcaaatggattcgtgttgatggttgaaggtggaagaatcgatcatgctcatcatcaaaatcatgctcatctggcgctgagggaggtcgttgaactggatcgcgctgtagagcgggcgttgggaatggtggacttggacgacacgctcatcatggttacggctgatcattcgcattctatgacgttcaatggatatccagatagaggcaatgacattctcggttacgctaatcgaccggataagctgccgtacgaaaccatcacgtacgcaaacggtccaggattccaaacgcatcgtatcaacgacagttcggacgatccgtcccacctaggcacctggattccggtcgaaaccatgaaccgctccgccatagactaccggcacctatcggccttctacttgggtgatgaaactcacggaggagaagacgtggctgtatttgccaccgggccgggatctagtctagtccggggaacgttcgaacagaactacatagcctatgtgatgagctatgccgggtgcatgggaccggccaagcggtttaacgaagcatgctccttcaaacctcgggcaccttcgagtggtgcggaatctgttgggaatgcgtcctcccagctgttgatcagtattgtatttttagcggtagcaaaaatgtgctaccacttttaattcgaacgttagccaaattagttgtaagtttcaaaatctgtaaatatgtcgggaaattgttgaaaattg

SEQ ID NO: 317 - DNA, 1644 bp, Aedes aegypti
attgcagtgtgtaacgtggatcgttaactacagtttctcgtgacgattatagaattaagcaattgtgtaaaacttataaataagagccaacattttaatcgatgcccatgggtgaatttctgcgcattccgtcgatggaacagaccaaggaaattgctaaacattggctagacgataaaatcaatactgatgagctgtttgcatgtgccatctgccataatgcaataagcgtggaacaccccatccattgtccccagtgctccaacttgttctgtgccacctgcatagatcagtggttcaacaccggaggcccgcggccttccaccgtatcaagcgtgaaacgttgcccatgctgccaggcgaaggtcacaatgaatcaattcacctattgtcgcgtctaccaggaggtacgcgagatgatcgacagcctcaacaatagtatggaagaattgattctgcaactaagaaaacccgttgttttctgtgaaaaacataacaaagaactgatattgttctgccaggagtgccacaagtgtatctgcgtaaaatgtgtcttggtggatcggcaccgtgggcatatcgatcaggtgctagaattggacgacgctcgagaaaagctgaaaattgcgatcctgagggagaacaacttcttggtcaaccggctagctgtgttgaataaggtgaacgctcgactattgacacgtgaaaacgatatgcaccggtcctgtgacgcagtcgttaacgagatgaactttgcggtagacgctatcatcgaaaagatccacgaagacaaagatgaaaggatacaaaaggagatagcaccggtgaaggaagcaacaaaacgacaacaggaagaagtggagtcgatcatccagcagtctttcgagttggctaatgaggaaactagtcccgatgtattggtaaaaacctatcagatgatccaagccatcaagaaaatgcactacgaaccgtttcctgtggagcaaccccaagatataaaatttacgaacccgataaccccgcccccactggaagtgcgtttttccgttccctgcttctcgcagcgaatcctccggtcctgtacggtattctccgttccgcaaagcttcgacggttttatgcttcagctcaagggctaccacgattcggacgaggacgtaatcaaactttcgctccgcattctcgagggctacgacataaacgacatcaaagtagtctgctatccgatgcgggaaggggaacccttggtccggtgtatggacttgaaaaagggcgaagacaacacggtgctggagttttccaactttactgagatgggcggcttcctggataccatgctcgacgagttgatcatagagatgaagttgagcctgtggggcacctattacgctaaatgtgctcacaaggactggtgcatcaagaagctcagtggactcaaagaagtcatggaagatattcaaaaaagttcatgaatggggatacacattgtaagatcgcgctggacgtgacccgttggttataagcatatctatttatgatgacgttaactttttagcattgtatgaaattttgttaataaatattgtgcgataattgtcgatcagcataagaagaatcaataatcaatcatattttagtaaacgt

SEQ ID NO: 318 - DNA, 5946 bp, Aedes aegypti
atggatcacgcggttcacgctgcccgaggaagaccatggaacaagctgcgcttcgagaacaacgagctggaatgcctgtaccagcggtacaccctcaagctgcaacggttctccgtgaccggagtcgttgccctggtcgtggtcctctgtggcgtcatggccgggctcagcctcggttacaaccaggcgccgacgttacataacgtcttcaactcgttcatgtgtctgatgtttgccgtcattctggcgctgctgcagttccggtttatccgggactcgcacctgccgtatctgtgctacgggatcctgttcttcacggcggccttctgcttcatctcgatgcccaccgtggggattgtgttccccctcgatacccgggaggtgatggccgaaggcgtctggcagattgtgttcgtggtgttcttggcgtacgccatgatgccgctgcagatctgggaggcggtgctgttcgggatcattctgccgtcgattcacatcgggctgaccgggtacaatatctacaatgagaattttcagtatttggcgtatcaacagctcgcggccaacatcgtcatcttcgtgggcgtcaacgtggccggactggtcgtcaacgtcatgatggagcgggcccagcgacgggcgttcctggatactcgcaattgcatcgcagctcgactcgagatggaagatgaaaacgagaagctggagcggctgctgctatcggtcctgccgcagcacgtggccatggagatgaagaacgacatcctgtcgccggtggagggccaatttcacaagatctacatccagaagcacgagaacgtcagtattctgtttgcggatatcgttgggttcacggtgctggcttcgcagtgcagtgctcaggagttggtacggctgttgaacgagctttttgggaggtttgaccagctggcgcacgataatcactgtttgcggataaagattctgggggattgctactattgtgtgtcggggattccggatccgagggcggatcacgcgaggtgtgccgtggagatgggactggacatgatcgatgcgatcgcgtcggtcgttgaacagacggatgtgatactcaacatgagggtagggattcattccggtagggtcctatgtggagttctgggtcttcggaagtggcagtttgacgtgtggtctaacgacgtgacgatggcgaaccacatggagagtggaggcgaggcaggtcgggtccatgtgacccgggctacgctggatgccctcggaggagagtacgaagttgaggcaggtcacggtgatacgagagattcgtatctccgcgatcaccagatcgatacgtacttcatcgtaccgccggctcatcgcagaaagcccctgatgttgaacaccttgggggttcgttcggctctgggggccgccaaccggagaaagctctcgttccggaacgtgtccaatgtggtggtccagctgctccacacgatcaagtactccgttccggttccgttctcgcacatggccaccggtgggtcaccttatcccggtggcggcggcggaagcagtggcggtccagccggtggccccggcggtggaatgttcctcgataagaacgcccgaaagattgctttcgtagcaagtttctcgaacaatagcaagcgagtgctccacttgcaacgtatgctccacgccagtccctaccaggcgcacatagctgccactgctgcagcagtaggcggcgccaccggagaaagcaccggtctgatggccgggacgcgtggaggcgacgccggcgattcttcccatcttcgtttgcgcagtagtagttgtagcatatctgtagctttcactcaaaatcgaagcttttaccccgaggcaactgtaaactcacgcgccaacaaggtcaccgacaagttcaagcggccgttcaagaagcgccactccagcgtttaccatcagccgtcgaaccgggtcaacaagttcctctcgcaggccatcgaagcgcgcagcgtcgatcgcgagaagtcggtccacgtcaaacggatctcgttgcagttccgggagaaggacaaggaacgccagtaccaccaggacttcgatctgggcttcaccacggccatgggctgcagcctgctgctgctgatcctcagcgctggattgcagatttcagcgttacctcgtaccttgatattgctgctgctatttctgacggcgttcatctggatcagttcgatcctgatgctgctgttggccgtaagactgaagtggatcttctgggatctgtcgcagagtttctcgctgcgcctggcgatcaccgttttcacgatcgtgctgctctactcggtcggacaggtcaatgtgtttacctgcctctcggaccacccttgtactactaacttcactacaaaagccgtggatcctttccaacactgtgcactaccgcagtacatctccctgtcagcggccttttccttcctgaccgtgtcgatattcctgaggttaccgatcatggtgaaaacgttcctgatcatgctgatgggcatcatgtactgtctgttcatcgagctgtcccacacgaacatcttcgactgttacgatcagcgggtggagtcggccatcccactgcacacgatctcgctggcgaggatcatcatcttcatgatcgcgatcttggcccacgggcggcaggtcgagtggacggcccggttggacttcctgtggcagctgcaggcttcgcaggagaagaaggagatgtcggttctgcagcagtccaaccggcggatcctgtacaacctgctgccgtcgcacgtggcttcgcacttcctggacaaccacttcagccggaacaacatggtgagtagttggcggcgtgctgcgtgtttgtttgatttgtatcatcagagctacagcaagttttatacggagttggacgggtccaatcagggcgttgagtgtctgcggctgttgaacgagatcatcgcggactttgacgagttgttgtgtgaggagcgattccagtcgatcgacaagatcaagacggtgggcagtacgtatatggctgcggtggggttgattccggagttcaagatgcttccgagcgatcaaggttcgacgcggaagctgatgacggctttgatagattttgtgaaggcaatgcgagtcacgttgaagaatatcaacgagaattcttataataatttcatgctgagggttggggtgaatgttggaccggtggtggctggagttatcggggccaggaagccgcagtacgatatttggggaaacacggtgaacgtagcgagcagaatggactcgacgggtattccggggtacacgcaggtaactcaagaggtgatcgacagtcttcagggcagccacttcgagttccggtgtaggggacagattaaagttaaaggtaaaggtgatatggtgacgtattttttgtgtgagcagaatgagaatatgctgaatgggggaggagcgatgggagggatgaacgggacgcgggatcgtcagacgccagcctcgaacattatctccaactaccaaacggacagttttcatcacatgaacattggaagtcaacaggggtgttaccaaacgcaggcgccggtcctgcagcctcaaagttactatatgaagcgatcggacatggatagcgggagtgtgaagaataccaagtggcagatgggcaacgacagcttctcgaagaaagagagctacaattttctggaaagcccgaacttacttcatcaacaaactcccatcgcttacaagcacaacaacataaacaataatcacattagcgcaggataccatggcaaccatcacagtcaaccgacgaatcacatgaacaacaacaataacaacaactacggcaaacgcaatgactatcttcatggcaatggctcggtgggaggtcagcaccagccaagttacaacattcgggaaaacttcaacatcatcgaaaacccgaacgtaaaagaagctgacgagaacaacttcaacaagctaaaccacagtggccataaagtacgaaacaacaaaaaccatcatcatcatcatcaccatcgacacgaccccggtgcgggtagcaccagccataatcccagcaatcgatacgtaacggcttcggagaacgaacctctgcttggctcgggcatgatcggcaacgccatcatcaagcctatccagcagatccaacagatacccaaatacgaacctccccgctatgccacgggaagtgctgccttccctcatcaaccgatgaacaacaacgccagctataatttccccgcagcccctagttatcaccaacagcaagtgccgcctccgcacgttctccgacagcaccagctctaccaacagcagcaccaacaacaacagcaacaactgctgaagcagtacatcaaaccccttccgaagctcccccacgaatacgacgaatcccgggaaatgtcctccacggatgatctcagctctcgaccgcgctccccttcggtttcctcctccgacgagagctactccaaaaccaccgaaggcgaagagctggatggtcactctccgctccccgcccggacttcctatcccaacaacttcaacaacccgctccaatacctctacccgggcgacatccaggtagatccaacctccccgcccaagctcagcccgatcgacttcgccaacatgaaagatttcgaggtgaccacgacggcggaaaccaaatcctcggcgaaccccaacaagggcgagtcgtgcaatagcttcgagttccatgacaagccttccgccgcaatgggcgccactcaaccacttcaaccttcaacgaacttccccaagtcgcctttcgaacgggaactgcaacgaaggcttgcagagtcgcaatcgcgaccgatgctggcctccgcagccggcaacggcaacaacaacctcgatcaccaatcggagctgccgtcggtgcggcgggactccgccgagaagatcaagaacgtgaacaacttgttgctggcgaagcaccccggaacgctggaggcgatcaaggaagccaccaggaataagaatccgtcagagtcgagtcatatgcaaacgtcggacacggaatcgtgcgagatcatccacgactaccggtcgtccccttcaggcggtggaccgggatcgatggaccgtcggcaccaacatcaccaccaccggcagcaccatcaccatgcactgtcgcaacaatcgccccgaatgcaccctcgaaacctccaccgcaagtacaatgcggcgaccaagaagtcctccaacgagacgtcctccaacatcgaagcggacgaagacctgcggctgtcgaacgaagcgatctaccggggtcgaggacgggactcggacgacctgctcgacgatgacgagccggacgaggaggacgtggaagaggaggagtcggaagacgacgacgatgacgaagaagatctagacgagcgggaaccacgtcggaacgcaatgcgaaggggactgggcgccaacggcggcgagcgatcgcgaaccggaagctgtgatgcgacgaggaactacatctcggacgaactgaagtacggtgcgggacactcgcgggaacgggatctcagccatcacaacaacagccatagctcgcaccacaaccaccagtcgctggactcgaacccggtggaaagccaatccgagtggagcgacgacgaatgccgggaggaggcgaccggcggcgccgaaagcaccggctacatcacggacgaacccggcctcgagaacatctcgctgctgaacgaggccggtctcaccgacgcggagggcgccctgtcggacgtgaactccctgtacaacgcgccggacgtggacgacacgtcgatttcgtcccgggccagcagccggctactgagcctggactcgctgagcggcctgtacgactgtgatttagactcgaagcacgagatggccatc

SEQ ID NO: 319 - DNA, 1842 bp, Aedes aegypti
tatctgtgctctcgtttttgacattcaaaccgcaaacctatcaacatgactacctacttcaactacccacccaaggatgtccaggaagagctggcccgcattgccaaggctatcgttgcccccggcaagggaatcctggccgctgacgagtcgaccgccacctgcggcaagcgttttgctgacatcggcgtcgagaacaacgaggacaaccgtcgccagtaccgtcagctgctgttcaccgccgacgatcgtctccaggagaacatctccggtgtgattctgttccacgaaacgctgtaccagaaggccgatgacggtaccccactggccgccatgctgaagaagaagggcatcctggccggtatcaaggtcgacaagggtgtcgtcgatctgatgggatccgagggcgagtgcaccacccagggcttggacgacctgggtgcccgctgcgctcagtacaagaaggacggctgcgactttgccaagtggcgttgcgtgctgaagatcggcaagaacacccccagctaccaggccatcctggagaacgccaacgtgctggcccgctacgcttcggtgtgccagtcgcagcgtatcgtgccgatcgtcgagcccgagatcctccccgacggtgaccacgatctggaacgttgccagaaggtcaccgagacggtgctggccgcggtgtacaaggccctcaatgaccaccacgtcttcctggagggaactctgttgaagccgaacatggtcaccgccggacagagctgcgccaagaagccgtccgcccaggagatcgccctggccaccgtgttggccctgcgccgtactgtgccagctgccgtgcccggagtcactttcctgtccggtggacagtccgaggaggaagcctccgtcaatctgaacgccatcaaccaggtcccgctgctgagaccatgggccctgaccttctcgtatggacgtgccctgcaggcttcggtactgcgcgcctggggaggcaagaaggagaacctcaaggccgctcaggatgagctcatcaagcgcgccaaggctaacggattggcatgccaagcaaaatacgtcgctggttcgattccctcgtatgccgccaacgccagtttgtttgtgaaatcgcacgcttactaaacaaaagaacaaacaaaaaaagaactctcacacacaaacacacaaatctggtcacactgcactttgcacgaattacaacgccccgattggtttagatgattagacccgcccgatgcacgaattgtcaatagaaccacacaaacacacacgaagagacgacgaagaaaaactcaccactaccaagcggaggcggcaacatcaacgaaacgaatcggaatgcaattggttgtagtcgaaaaaagtgcggtggaaagaggcattcctattgtttccaatatttcccatccggcgaacttctctaacagtttcaaactacctcttcttaaatcgacacacaatagacaagacagagattaatgtacttatggtagcacacagtggaagcaatttagagcaggaatcaactataggacacgagtcgaaccgcgcgatggatgtttctgacgaattgtgtttattttatttccctattagaatagaatgtatctaacctcgaaaagttttctgttcgtactagacgttttttttagatatgtgtttgtgtttttaattatgattttccaactactgataactgttgcttgttttagagctagatgaaagtcggacacgattatgtttatagttatgcttggttatgtcaatcgaaagaagaaaaataatatggtttttgtaaaacaaatacacaattggcacaaaaat

SEQ ID NO: 320 - DNA, 968 bp, Aedes aegypti
gaaaagcctgctgctatacagcagataattctttacgacgcattcaataactcaatttgtgtagctggtgtacaaaacctattgtgttctcgataagcgttttattgtgagttttgtccagaatttgttgcaagtctgcccgtgcattgattggcgtcacagttgaattgcttttaaaatattaccccaagaagtgaagaccacagaaggttcaatttaaatccacaatcgttgagagcggttggtcagtttaaaaaactccggagaagtgtgcagttcagttcagtggatctcagccgggccgtttaaaaatgtgtgcaccaattccattaaaggagcttctaaaccaattacggaaggaggttataatggtcagattgcagcagatcaaagagcggatgtcccaacaagagggctcacgcccttctcaacatcgaattcgccaagtatatcaaattctcgatgtgactgttgacagacgagatctaccagcggacttttttcagcgaattccaagaattcctgcgaatcgaccaatcaaaaagcgccatggttctcatcgatcgtcctcggcgccgccaagaagtagtcctttgacatcaaactttcgtgtacatccagcgtttcgccggtttaacgatcaacgcccggtaatagacaggagaagtgcacccaccagcacgccacgggatacagtagttttgagggttcaagtgacacggttatatttgatgccaaatcaaggctctcacggtgaactgaacacaaatgtgcctaagaacgatcacacaaatggtgatcgacaactgtgataaaagctgaatgcttttatttgattacccgatatctgtattactcgaccaggcgttcagaagaagtgcgaatttagtttaaaatttgtagtacataaatttgaaatgtgtattatttcacctaaataaagatatttttcatataaccggtacact

SEQ ID NO: 321 - DNA, 1050 bp, Aedes aegypti
atggaaaaccgcttgtgccgtttgtgtttgactttgaacagcggccggattccgctcttcgacgagatgaccatgaagccgaatgtcctcctgatccaaaaggtagtcgaatgcacttctataaggataacagctgaggacgattatccgtcgtcgatttgcggggaatgcgagcgaaagctgaacgaattgtccgcgtttaaaatccagtgcatcgtgaataacgatttctaccgagagaagcaagcggaactacggaaggaacaggtgtcctgcagtcaacagcccacggaagtggtttgcctggacgatgacgacgaagaggaggtgtattatgcggaagagtcccaaaaggaatcggaggatcaaagccatgaaccggttcagaagagggcccgaatcgagcaggtcatcatcgaggatgacgatgacgaggagcaggaggaacagaacgaacggctaaactacgaaagcgagcaaacggaatacgaagagttcaacctggacgacttcgaactagtggaaggccaagaagtggatcagtactaccagccggaggaaccgctcatcgacaacagcgccatcctgacgtcgattctgctggacgacgaagaggacgacggtggtaacaacgcgctactcatggaccaaggccactacgaaaaagtctacccgtacgagtgcgaattctgccggagacgttactcgtccctcacgaagctggaatcgcacgtgaagtcccactcgcagaaccggatgaagtgcttcatctgtggcaagctggtcgtggtccacctgctgcggcatctccgttcgcaacaccccgggatgtcgtttcccgagccggtgcgctgttggcactccaagtgctccgatttggaccaagtgttcctggacgtgaatcaactgttggcgcacatggacgccaagaggacgaggagacggtaggataccgtggctagaatagtgcgtaaatcaagtgcctttttactattaatatattatttaaggttgatgagactgtacatatataaatttttgcgctcaaac

SEQ ID NO: 322 - DNA, 1381 bp, Aedes aegypti
gcggtgtattggtgcagcggagataacggtattgttgtgcatagctaactgtggtagataacggaacatttggagcgaaacaatggctcacaatgtggatctggtgtgcaaggagatcatctacgacgaagtggatagtcagtttgccgaaccggacccgacgatgatcgcggatgttcgggtcattcagaacttgattgggctggaacggttgacgattccgtcgtgcaactacttcggctcggtacagcaagatatcaagccgaacatgcgcaagatcgtcaccacttggatgctggaggtatgcgacgagcagaagtgcgaggagcagactttcccactggcggtaaacttcttcgatcgattcctctgcgcatgcccgatcgatcgctaccacctgcaactgttgggatgttgcgctctcctgttggcctcgaagatccgccaatgtcatcctctgacggtggacgttctcagtgcgtacaccgaccatgccgtctcgccagatcagatcaggagttgggagctactgatgatcagcaaactggagtggaacatcacggccgtaacggcgttcgactacgtcgatcagattctggaacgcgtcaaatggggatcggacgactcgcggctacgggagcacgcgcacaccttgatccacgtctgcagcaccgaaaccatcttcatgcagttggaaccctcgctgctagcggcggcttgcatcgcctccgcaagccgtggcctcaacgtgtccaccaagatggccaccgggttcgatctgtgccggttgacgttccacgacattgccaaaatcgatttcatcgtcaaaatcatcgaagaaatcgtcgccaaggaaatcgccgacaagcaattgcaacagcagcagcaacagatgggcgccaatggggccgctgggggcagctgcaaggaacagtaccagcaagcaccgcaaaaagttggtggcgccaccgtcgagcagacgacgtcacaacagcagcccgaaacgcccaccgatgtgcagtttatctacttttaactgtaaacgggggacgctgcgtagtttaggaatttttccgggcgttcgtcgctgcttttcgcagtgaacgatcgcctggggaagctgtatctattttttctctctattgttttgagatatttatctgccaaaatttacgcatgttgttaagaaagcgaaagttatattttcgatgaaatgggaatgtaggcgctattcgtcatttgccgacccctccgagcaggggtgggttgattgaaatgtcactcggttgactgaaccaaaatttcatattgtataatatttacactgaaaacaaaaagcggaaaccagaatctttgaaaacttagttaattttctacaaac

SEQ ID NO: 323 - DNA, 853 bp, Aedes aegypti
gaatgattggcatcatcagcagaaactgcttttaccgccaaaacgatctagttgctatcgttagaaagtgcggatttttgggcgtatcaagttctaagttaataaatagttctcccaatatgtctataattcaaaaaagaggagccctaatagttttggaaggctgcgaccgtgcgggaaaaactacgcaatgcaaaaggatcgcgccggacacaaagccaaattcatgaatttcccggacaggtcaacgcagtttggtgccttgattaattcctatctgaccagcaaggacaattttaccgatgaagcaatccatctgctgttcacactgaaccgatgggaggccaaaaacgaaatggaacgcctgctgcggagtggcgtcacgttgatcgtagatcgatactcctattccggagtggcattcagtgcggccaagggattgaacatggactggtgcaaagcgccggaaaccggtctgccaaagccggatcttgttctgctactcacgttgacggcggaagcgatggccaaacgcggaggatttggccaagagcgatacgaagttccagaactgcagaaaaaggtgatggagaaatttcacaccctgaaagacgatagctactggaaggtggtggatgcggataaaaaagaggacgcgctatctttggagctttgcgagatggttttggactcgatggaatcgtgcagcgataaaccattgggaaagctttggtaacattggttaactagttcaatttaaatctctaccatgatgaatatgattccggtatttacctacattaaggatagataagttaaaacaagaaagaatatattttgacatacattttct

SEQ ID NO: 324 - DNA, 2052 bp, Aedes aegypti
cggcagatgtgattgttcggtgaaattccggcgttgttccagacggaagtcgttccatcctacgacggatttgattccggaacgaccaggcgactcaaaaacgacaaaaaatccggtataaaatggagtagtgtttttcaaacggtaaaaagtgtcatgtcaaagaaggtgctctcgagagtttgccaaattttgcgtcgccatttgacctacaatcagccgaagcgcttatcagacgatcttgcagcagcctagtgcgaataaagtaactgagcactccggttatcgaaatctgacaacatggcgttgcttcctccggatccggtctattgcctcaaatcgtctgacctcggcgcatttcattcgctgtgtttccacacatcggaacggctgtatgccggtaatgtccgtggaacggtgcagctttgggatttgcagacgaatcgctcaacgtatcagctgtcggtgggcaagagtcccatcatcggcttggcccacaccgaagatgccttgataactcaggaaaaggagggcaccgtaaagttgtgggagctgaccaactcggcgtacgtcctccggcacgaatccgccaccgaccacgtcggtttctgtcgtttcgtgtaccataacgatgctgtgataatgccccgcggggaagctaacattgccgtcctctgtgggcggacattcaccgagcggcaactgctcaatccgactaaagccgatcccaaacttccgcccctgggaacggtcatgtgtatcctgccggtggagataaaggacaaggcttaccttttggccgcctacgaggcgggaatgctagtgctttgggacctgaccagctcgaaaccgatcagccatctgcaggtgtgtcaggacgaatgcctgatggccatggattacgatccgtttactaatcgtggcgtttgcggcggaacttcggacaagatctttgtcttttcggtggaccggccgacgatggaactacgcaaaaagtctgaaatagcaatcaagaacgccgggattagccgggtgaagatccgcaaagacctgaaggtgtttgtcagtgccggacgggacggcaggattcgcattttctcgtggaaaagtctgaggccgttggccgtgttgaccgagcaccggggagaactgttggacgtgatctactcggacgagaaggtatcgatgtggaaggctgtcatcatggccgcggccggatcagacggacagatttccctgtgggatctgtacaactgacgatccggtgccccggtggatgaatgaaaaggcagataagtacttctgtttgacgatggatttacttttttgaacgttgactttcactacttgcgttctaaggaattaaatcttattcggatgaaccttcaaaagcttttatatacaactcacatttacacaactggcaaattataagaatcgccatgttacggttccttagctgttccttatcgttcttttttaaaccttaatttattatgttacacgtatacttattaacttacactgttgttggtaatcactcattcgcgaacacattttatgctactaagtctctacttaaacgaaagtttagttaaatcccggatcgtgtttgttgaatttacaatttgtaacaactatgaatctactacgactagaacgaattatgaaaatgtaagaataaataattttttgctacatgttttacaacaatataataatatatacatcaaatcgcaacgattggttggttttgcttgaatgccgaaatccgtgttaatggtgttaccctgggaatatgtatactaacctgtgttattcaaatgtacgacaagatatccatgacataatcgcctgaaaaactgatccgaggttcgattttccatagtagggtcagtgttcccttagtggacagtcccctatagtcgcactagtggattttaacggccgttttttgacatgaaggtcaggagctatttatctaagtaccattgatacacagcttgattttgtttaaaaaatgatcgaaataattagttttgcttaaaattt

SEQ ID NO: 325 - DNA, 2041 bp, Aedes aegypti
gtgttgtgttaaaggatttcggccgtgaccagaaaaactttcgaactcaattatcggagctggaattctatatttgagagtttttttttcctcgagaatggacccgccgtcatcagtggctgcgttgacgtcgtcatcgcgatcgcctgcagacgatcaacaacttgtagacaacactggtgaacagcgatcgatcgaccacgctaccgtggatgaaatgctcaatatcaacgcgttcacggtaccacgtgttcccagtgcctgtaatgatggcgcagtggaaaagtacaaactaaccggtaaaagacttggccgtggagtcgctgagtctggcttgacgcatgaatgcggtgtattcggagcgattgcaacgggtgaatggcccacacagatcgacatttcgcaggttatctgcctggggttggtagccctgcagcatcgagggcaagaatcggctggtatcgttaccagtgaaggcaaatgtgctaagaacttcaacgtccacaagggaatgggtatgatcaacaatatcttcactgacgattcaatgaagaaattaaagggtaatctgggtatcggtcatacgaggtactcgacctcagcggcttcagaagaagtcaactgccaaccattcgtagtccacacggctcatggagtgttggcggtagcacacaacggcgaactgctaaactgtgaaagcttgcgaaaggatgttctatcccgaggtgttggcctatcgactcacagcgattccgagctgatcacgcaagctctctgtctgaatccgccggacggagaagacgacggccctgattggcccgcacgcatcaagcacctcatgcagttggctcctctttcatactccctggttatcatgttaaaagacaaaatctacggagtgcgagatccctacggaaatcgacctttgtgcatcggaaagatcgtcccgctgagcattggttcttacagacaagaaaaagtagacaaactggccgccgagggatgggtcatctctagcgagagctgcggattcctatccatcggagcacgctacgtcagggaagttcaaccgggtgaaatcgtagagctgacccgcgaaggaatcaaaacgatcgacatcgtcgagtgtccggagaaccgacgccacgccttctgcatcttcgagtacgtctacttcgctcggtcggattccatcttcgagggtcagatggtttactcggtgcggttgcagtgcggcaggcagctagctcgcgaagcgtacgtagacgcggacatcgtgagctcggtcccggaatcgggaacggctgctgcgcacggttacgccagagagactggccttcactttgctgaagtgctctgcaagaatcgctacgtcggacgtaccttcatccagccttcgactcggctccggcagctcggtgtggcgaagaagttcggtgctctttcggagaatgtttccggtaagcggctggtcctcatcgatgactccatcgtacgtggcaacaccattggaccaatcatcaagctacttcgggacgcgggagcacaggaggtgcacatccgtatcgccagcccaccgttgctgtatccgtgctacatgggtatcaacattccgacgcgagaggaactgatcggcaacaagctgaacccggaggaactggccaagtatgtcggtgcggacagtttggcctacctcagtgtggaaggactgcagaaggctgttcagctgaacatgcggaagaacaacccggaaaaggtgggccactgtacggcctgcctgaccggagactaccctggtggactgcccgaagacttggattggtgaagcgggagaaggatttttctttccagtttacttttttatgttatttaaagtttcgtcatgaaaactatgtcatgacataattgattcgctatcggtcatgggatagagacgtattgcctacatttaggaacataaagtgaaaaagtccgatctgagatctataatgactattttatagaaagactatatgaataaaggctagaatttactaaacat

SEQ ID NO: 326 - DNA, 1593 bp, Aedes aegypti
ctcaagcaacctcccggttgctcctgctggcagctattgccctattaccagcagccctcggtggatcaccatttatgcactctcgccctagaaccatcacacgaactgttagttccaacatcactctcgatgaaccgaccctcgcaaatccatacctggccccgggcggaaaggaagcccttggcacgaaacaagtgtcggattttagccttagccaaggcaagaacgttttcgatgtaatctaccagtggaagattatcgatttcttgtacccgagcctgcaggctcgcaacgatgccattcgtactaaacaattcatcccggagaacaacctcccgctgggcgttgatcgcttccgcaaccgcatcttcatcaccacccctcgctggaacccaggtgtaccggctaccctgtcgtacctgcccctttcccgttcaggacccaagtctacctctgatcccctatccagactggagtttccatacgtccccccaaaaccccgactgtagtcgtctcgtatccgtgtatcgtatctacgtggatgagtgcgatcgcctttgggtcctcgacgccggagttatcgacacccttaccaacctccaacagatctgtccgccaaagatcctagcattcaaccttcacacagacgaactgctgttcagctacactctcccagcggatcaggtcaaacaggactcgttgcacaccaacatcgttgtcgatatccgagacgctcagtgccaggatgcgttcgcctacgttgccgatgtgtggcgctacggaatcaccgtgttcagcttgcgggaattcaagagctggcgcaccaccaactacctctacaacccgaatcccttcgccagtgactacaactacaaggagctgaacttccagtggtctgatggagtgttcggaatgtctctttcgcctgtccatagaaatggcgatcgcatgctgttctaccacccgatgtccagctacacggagttccaagtaccgacctcggtcctgcagaacgaaaccatctggcagaacttcggtctggccaaggcattccaaccggtgggcagtcgcggtaaggccggtcaatcgtccacctccggagtcgcccacaacaacgtgcagttcttcacccttgtgcagcagagtggagttggctgttgggatctggccaaaccgtacaaccgcaataacttaggtgtggtcgagaaggacatggacaagctgacgttcccgaatgatttgaaggtggatcgcgagccgaagcaatcgctttgggtgatcagcaacaagctgccggtgtttttgtactcgcgactggactacagcgaggtgaacttccgagtgctgaacgccggagtgcaggaagcgattaagaacaccgtgtgtgatccacggatgcctccgagcttggcctacgaaaaggagccggagtgcgatgtgtagagatttgatttcttttatgtattttgatgtgtaagttttactactgttgataagagttgtctagagtaaggtttaagttttgattcagccgtgctgatatgataatagtaaatccatgctcgaccagtgaaaataaatgattcaaagaac

SEQ ID NO: 327 - DNA, 1394 bp, Aedes aegypti
tgcggttctctcctcacacaagtctagccgaggaacaggaacggttcttcactgtgcaaatttatctcccctcggaaaagtagtcaccggatagaccgaaaaaaaatgtcagaaccaagcaaggacgaactacgcaaggaaattgccgccatcctgaaggatgccaacctggaggaaacagccgccaaaaaggttcgtctccagctggaggccaacctgaagtgtgacctgtccgcccgcaagaaggaagtggacgacctcgtcatggagtacgttaacgcacaggacgaatccggtgaggaagaggaagaggacgaggaggaggaagaggaagcccccaaaaagaagcaatcgaagaagaagaagcaggaaagcgaagacgaggaggaggaagaggatgaggaagattccgaagacgataagaagaagaagggcaagcggggtgctccggccaagcgaggcccggccaaaaagaagaagcgcggatcggacagcgaggaagaatccgaaggatccgacgggggttcggacgatgactacaagccgaacaagggtcccaaagccggagccaagaaggctggtcgcaagaagaagggttcggattccgattcggacgaagactggaagcgatcgaagccggccaaggccaagaaggcccccggagccaagaagggcaagggaacgggcttcactcgtccctacaacctatcgccggaattggcagctatttgcggagctgatgctctgccgaggcacgaagtggtcaagaaggtttggaccatcatcaaggagcgcaatctgtatgacccgaagaacaagcagtacgccatctgcgactccgagctgcagaaagtcatcggcgtcaaacggttccgcacattcggtatgctcaagtatttgaaaccgcatttcctagattaggatgggaaatctacatgatcctttcctgcttcgcgtaattgtaaaattgggggacttcttccaaatcaacctaataactgtgcaaaaattcacacgggatggaaatcctccttactctgtaggttttaagcgaaggacgtgtaagctgatgacaagatatgccgttcgttaggatcaattgatcctaagcagggcagaatcctacgaacctgggtatagaagatatatcctaattcaaagtatatttttaacattttcaataaccaatatcagacgattaataaacaaaaaagaaaacggataagtaagcaagatggcagaaaatcgatagatgataaattagagtgttaattttaagtgtggaagtttgaacgaccatataacgacgcaactatttcgtttaactgtgtaatgggaaaccgtggtaatcgcgaatttctctgagtaacaaaaataaagtatgaacaaaccgg

SEQ ID NO: 328 - DNA, 1630 bp, Aedes aegypti
agttgaaaaacgtcgttctaaaatcaagtgactagttacagtaatcgaccttattagaaagttaagccctataaagatgcctctatgtaatcataaaaatatgtccggcaatgccaagctgttgcacgagaacctctgggagtcggacccggagctgatggacctgatccggaaggagaagaaacgccaggtgcacgggctggagatgatcgccagtgagaacttcacctcgctctcggtgctgcagtgcctgggatcctgcctgcacaacaagtactccgagggattgcccggacagagatactacggtggcaacgaattcatcgacgagatcgaattgctggcgcagaaacgtgccctcgaagcataccgcctcaacccggatgaatggggctgcaacgtgcagccgtactccggttcgccggccaactttgccgtctacaccggactgatcgaaccgcacggtcgcatcatgggcctggacctgcctgatggtggccacttgacgcacggattcatgaccgccaccaagaaaatctccgccacgtcgatcttcttcgagagcatgccctacaaggtggatccggtgacgggcctgatcgactacgacaaactggaggagagcgccaagaacttcaagcccaagatcatcatcgccggaatctcgtgctattcccggtgcttagactacaaacgcttccgccagattgccgacgccaacggtgcattcctgtttgccgatatggctcacatctctggattggtcgctgccggtgtcatcccatcgccttttgaatacgccgatgtggtcagcacaaccacacacaaatcgctgcggggaccccgcgccggagtgatcttcttccgcaagggcgttcgcagcgtcaagcccaacggcgacaaggtgatgtacgatctggaggcaaaaatcaatcaggctgtgttccccggaatccagggaggaccacacaaccacgccattgccggtattgccacgtgcatgctgcaggcccggacgcccgagttcaaagactaccagacacagatcatccgtaacgcacaagccctgtgcaagggtctgctcgagcggggctactccatttcgaccgggggaaccgatgttcatctggtgttggtggaccttcgcccggctggcatcaccggagcccgtgcggagtacgtcctggaggagatttccattgcctgcaacaagaataccgttcccggagacaagagtgcactgaacccgtccggaatccggttgggtacgccggcgttgacgacccgaggtttggtggagtctgatatgacccatgtggtggacttcatcgatcggggactgaaactgtcgaaggagattacggccgtctcgggtccgaagctggtggacttcaagcgagtgctgcacgaggatccgacgctgaacgctaaggtgcaagctctaaaggaggaagttcaggcgtacagcgcgaagttccccatgccaggctatgaggagttctagaggtttgttgggaggtttttagatctgtaaggactgtgtccgctgctatgaccaatactattgaatatattcatcacttttttcttggcatacgaaaggtgctattgtatgctacatacctatgaa

SEQ ID NO: 329 - DNA, 1859 bp, Aedes aegypti
  misc_feature (1333)..(1858): n is a, c, g, or t
gaagaagaagttaatccagcgtaaattgctattcgggcggatttggaactgcaattttgcagtaatatctggattttatgttaaagtactgctattttccatcatgagtggcacttgagtagtaattgatttaatgataatcgataatagtttaaaaagttcaaaaaaacgaccatatcatcactcaaagtggttgtacccgagtgctgtatcgcccaaatcgaaagtcgctcttggtttccgaaaaagcgttggaaactttccaagcaaacctcgcgggaaaaaaagcgaagtgcggagtgaagagagtacaaaaagctgcaagcgaaagccggtgcataaaaccgtttgttaaaggattcctgcctgtggcctgagaaatagcgtgtgttgtggaaaatgtctcagttcaattatctcaatgagctgaacaatataatcacaatggacggcgaactgacaaaaggacccgctcctcggtggcaaaaaaagatggatctttcggcagcatcatcgagtttcaacgcaagctcaatgaacacatctcgccagaagctgtcggtttcgttcaacggccagcaaacggttccgcccgggacgcttagcgggaagaccccgagtaaaaaacccggaggtggatctagcaccaagaaggaaggtaaatcccaaacgccaagtcaaaagcaaccttccggcggggacagattcatcccgaaccggacgactacggatttcgacctgggtcactacatggtgaaacagaacgaagccaggaaggaaaccgaaggcgacggaagcggcgaagatgggcagcagcagcagaacggaacgaatccgagccccaagaatgccgagcgcatcaagattctatcagaagcagtcaagggatgtgatataagcaacaaacggattttgtcctaccagacaaaagcaccggcagccccggaaggacacatgaaccccctcaaagtggtctactcggtgaagacgcccatgtccacgaaaagtggttcccgcttcattccgaatgcaccggagcggattctggacgcgccggacatcatcaacgattattacttgaacctgatggactggagcggggacaatgtggtggccgtggctctcggatcgtcggtgtacctgtggaatgcggccagtggcaatatcgaagtgctgtacgagaatgaaggcggtgatcatgcgtgcgcactgagctggattcaggaaggacacatactggccgtcggaacgtctacgggcacagtggagctgtgggattgcgaacagatgaagcggcttcgaatcatggatggccattccggccgggtgggannnnnnnnnnnnnnnnnnnnnnnnnnnnnnnnnnnnnnnnnnnnnnnnnnnnnnnnnnnnnnnnnnnnnnnnnnnnnnnnnnnnnnnnnnnnnnnnnnnnnnnnnnnnnnnnnnnnnnnnnnnnnnnnnnnnnnnnnnnnnnnnnnnnnnnnnnnnnnnnnnnnnnnnnnnnnnnnnnnnnnnnnnnnnnnnnnnnnnnnnnnnnnnnnnnnnnnnnnnnnnnnnnnnnnnnnnnnnnnnnnnnnnnnnnnnnnnnnnnnnnnnnnnnnnnnnnnnnnnnnnnnnnnnnnnnnnnnnnnnnnnnnnnnnnnnnnnnnnnnnnnnnnnnnnnnnnnnnnnnnnnnnnnnnnnnnnnnnnnnnnnnnnnnnnnnnnnnnnnnnnnnnnnnnnnnnnnnnnnnnnnnnnnnnnnnnnnnnnnnnnnnnnnnnnnnnnnnnnnnnnnnnnnnnnnnnnnnnnnnnnnnnnnnnnnnnnnnnnnnnnnnnnnnnnnnnnnnnnnnnnnnnnnnnnnnnnnnnnnnnnnnnnt

SEQ ID NO: 330 - DNA, 1659 bp, Aedes aegypti
cttgcagacacctcaggagagcttaactttctcacccccaactcggccaaggacatccagcgcgagttcaccgccggtatcaaggaacgttgcaaaatcccggtgatcaactgccaggcagtgacgaccgtgttggatcccgtgacaggaaacatcagtaccgttctcacgacgacgtccccacaggcagaaacggccaccacggcggtcgccagcaagaagcccagctacctgaatctggcctgctgtgtgaatggctactcgaatctgacgacgtatgattcgaagctgaggcaggacatcaacaagtcccgagaagtctcgccgaatcggccgatcattgccacgctgcactacaatcggtcggagggtggcaatttccagctgaccgcacccacgcttagctacattagtatgaacaatactatcaataacaacgttagcaacgggggcaaattcggcggaatggtgaacggagcaggacggtttgtgggtagcggcgggggagctgctaccggacaggatgtgacggataatgccatgttcaatgggaatggatttggtggcggggggctgaggaccagagtgatttcttcgcagtcccaaattagcagtgtgaaggaaaccgaaagagtgattaagaagagcttcattcagcagcgtgtcgaaaagctgtatggtaacgcggaaggtgtagtgattaataagcaaatctacaacagcaatgagaggaaatatttaaacaacattgccaacgaaaatgtgagcaaaaactacaccaatgcgctgcatctgaatgggaacggaaatgtggccaccaatggagatatggaagcgctgccggtgttgcggcatttgaggcctgagttccgagcgcagctgcaaatcttttcgcccaaaaaagttcccaagacatcgccgagccgcagctctactacagtgacatccaccaaaaccaaaaccatcaaagcggcttgcattgaatctcagtccgaaccgtcactatcagtggtcaagacgacagaatctgtgacgtccggtatcagcagtgatgcaacaattgctccccttcacgataatagaaatggaaaccactttctgcaggtgctcaaaaacgaacagaatcggctactcacaatggcagccaacattgagagggacgtcgaacagtcgaaggccgatggtgtggagatcagcgaggaagtcgccggttacgtgctggtagctgcaggcaaggcacggctgctatgttcccagaaaatgaaacagttcgaaggtctgtgctacagcaatctgaaccaatcgcccgatgaaaagttccaaacgacgtgcgaggatttgcgtggtttctgggatatggtgatgttgcaggtcaatgatgtggatgcgtccttcagtgagatcgattctttccggagaaatggctggaagaaaccgacacccaaaagtcccaccccacaagtacgcagcactgcgcgaagtaccaagcttacgaaacggcccttcaagtcccctgccacgacgtcgaccaacggaaccggtaactcggcggacggttcagcagccgatacgaaaaaagctgctgctgctgcggccgccgccaaacgcgaagcccagcggaaacagctgatggagctaaagcggaaacagaaactcgcc

SEQ ID NO: 331 - DNA, 606 bp, Aedes aegypti
atgttgttgcaacattaccaccaccactcgtcatcgaatcgattcaacaacacgaacgcacgcgcccatcgttcttcttcccctggccatcgacatccagtccgcagcctgtgtgatacaccggaccgagaggaatcagtctttgtccacgaccagcacccgtcacatcactcgcctcccacaatgttctccgccctgatggacgccgcgcgcaattcgcccttcaaggcccccttcagtcgggcccagtgcgatgccagtgagaaatcgctggtgccctcgggtgaccgtaccatccaggccgcctccaccaaggaggtcgagttcggatccaacgaattcttcggactgtgcgccctcggaggtatcctgtcgtgcggtttgacccataccgctgttgtgccgctggatttggtcaagtgccgtctgcaggtcgatgccgccaagtacaagaatctgttccacggcttcaaggtcaccgtcgccgaggagggcgcccgcggtctggccaagggatgggctccgaccttcttcggatactcggcacaggtgagtgcagtttttgagcacgtgattatttatacccgagcaaggaaagaaagctaa

SEQ ID NO: 332 - DNA, 2530 bp, Aedes aegypti
atggagtctgaaaatgtggcggacgtttccatcgagaaaaagtcggcttctcgggaagtgagtcctagcggaagtggcgccggatctccgaggaagtcgcgttcgcggtctcgttccgtatcacaggcgggaagtcgttccggtggcagtcgcagtccaagtgccgaaaaggaagccaagtcccggtcgaggtcccgttccaagagcaaggaaacatcccgtagtcccagtccagccaggtctcggaagtcccgatcacgcagcggaagtgccgacgtagtgaacgaaagtgcagattcgggacggagatcgaaaacaccggaagagagtccggttaagaatggtgaccggtcccggagtggttcgccggtggcggaaaggaaaagccgcagtcgcagcgtaggttccaatcgctcgaagcgatcgcgttcgaagagcgcggagaaagatgcggccaaatcaaagtccagatccagatcgcggtccaaatccggatcgcgctcgaaaagccgctcccgttcaaagtccggcagtcggtccaagtccagatcgaagtcccccgcgcgggctaagtccggatcgcgatcgaagtcacgatcccgatccgggtccagatccaagtcccatcgcgttcgcgatccaagtctggatcccgatcgagatcgaggtcacgctcgagatccggttcccggtcgaagtcacgctcgcgaagtcgaagccgttcgggaagccgcagtcgtagccgaagccgaagcggttccgctagatcacgttcccgctccaggtccagatctaagtccggaagccgtagtcgcagtcgctccagaagtcgcagctcgcgtcgtagtcgcagccggagtcgaaagtccggttccagatcccgttcccgatcgcgttccagatcgcgatcgaaatccggttccagatcgaggtcccgctcgagaagtcgcagtcgctccggaagccgtgcaagttcggccaaacgcagtcgaagccgcagtcgcagctcaggaaagtcacgcagccgatcccgacgatgatggcgttgagaaaacgcccaagaagcgagccaagatcaccgattccgatcacgaaggggaagatctggaggaggaggagcaggtcccagaggaagctaaagctgacgagggtcaagaagagccacaaaccagtacgatcgtggacgcgggagattcggaagatgaaggaatccgcgaggacggaggcggtggcgacttcgttaatgacttcgagttgatgttggcccgtaaaaaggaagaaaagggcaaacgtcgcaagcggaacgacatcgacctgatcaacgataacgacgatctgatcgcacaactgctgcagcaaatgcgtcacgccgccgaggaagatcggcagctgaacaaggagaacaaaccggccaccaagaagattgcaatcctcaaacacgccatgtcgcagctcatcaaaaaggacctccagttggcgttcctggagcacaacgtactcaacgtgctgaccgattggttggccccgttgccgaacaaatcgctaccctgtctgcagattcgggaatcgattctgaagcttctctcggatttcccctgcatcgagaagtcctacctgaagcagtcgggcatcggcaaagctgtgatgtatctctataagcacccccgcgagaccaagtggaaccgcgagcgggccggccggctgatttcggagtgggcccgacccatcttcaatctgagcacggacttcaaggcgatgactcgcgaggaacgccgagagcgagagatgaagcagatgcccaaaaagcgcaaagccgcaccggaacagtccggtcagagcagttccacctccaagaagggattgccgttcaccgaggcggataagggtgctcttcgaccgggagacaaaggctgggtgcaacgggctcgtgtccccatgccgtctgataaggaatactttgtgcggccacagtcgactagcgatgtcgatatgagtcggatcaccaagaaaaagatgaaccgctacgagcagcatctgaagaagtttatcgacgccaaacggctgaagcaaagtcggcgagccgtggagatatccatcgagggtcggaagatggcactctaagttcctccagttcctcgaatcgtgtctccattaagtgtgtaggtaatttttgtaatgatcaatcatgagtacgactggtcagccagcaggtacgtatgatcttcgtttgaaaaatccttttttcattacacatcatagatatttaactaagaatgctaaatagaaacatcaccaaaaccaccttgaatgcgactaagatccacagaacttgacggtggcgctggtggtgtcctagtaattaccggtaatttaattcccttccatctggttgttaatttcgctgatttgagttgacgcatagatacaatgaagaagacttgattttatgtttccaaactagacaacaaaaagaagccaggataatgcaaataaatgcactgaactacatccaattgtatgtatcttgaac

SEQ ID NO: 333 - DNA, 4633 bp, Aedes aegypti
atgtcctccagctggaaaggatttattttcgcttcggtgctgctgctgggagttctcaaattggcactagcgcaaagcacgacgcaagcggcggacaccggaggtggtggcactagaggttcacctttatcacccacaagggacggaggaggaggaggacagtgcatttggtatggggtgtgcaacaacgaaacggcactcacctcccagtactgcagctacgatggtcctgcaaagccagccagcactcaaaccaaggacctgctgaaggtctggtgtaagcatctgctggccgacgaggacggaaatggagccgtcgatacgtgctgtgatgccgaacaggttcaaatccttaacaacaatgtcaaactggcggcgaatttcctcgcccgatgtccctcgtgtatggccaacctggtgcgacacatgtgcgattttacgtgcaatccgaagcattcctctttcatcgaggtgaaagcaaccgagcagaatgataacaccaagaaagaatacatcaccgaaatcgatctgcacatcatggagcagtacatgaacgggacgtacagctcgtgcagtcaggtgtcggttccctcgaccggtcagctggcgctggatctcatgtgcggcgagtggggtgcctctcgctgtagcgctagaaaatggttcaactacatgggcaccaaggaaggcaactactacgtacccttccaaattaactacatcgcccatcagagcagcaatgacagtgcgtttaccccgctgaagccccgggtcgtgccgtgcagcgagaagctggatgacaaaacacctgcctgttcgtgcattgactgcgaagcatcctgtccgcgaccaccggccccagcgcccccaccacagcccttcgtgatctatggcttcgacgggtacgccgtggttatgttctttgtgtttctggtctgcagtggacttttcgtgatcggcgcatgcctctgccagtccgggagcaacaacggagccgaactactggtgcctggagacacattgcactcggacctgcgctcaaccgtgggtcgccgtttggctggtggactgtctaacagtggcgatttgggtaccgatcgcgaagattcgcccttacaatcgaaaagatcgagtgccacatgggatggcgagcaggagctccgaccgcacccgaacaccatcaacggcgatgacgacgccgaatccggatactttgagcggctaggcgccaaaacggaaaccgctctggagaagttctttaccgcctggggtacaacctgtgccaaacatccgtggatcgtgctgctgtgcggtcttctgttcatcgtggccatgggattcggaatcaaattcctgcacatcaccaccaacccggtcgagctgtgggcatcacccaactcgcggtcccgtatcgagcgggaatactttgactcgcactttgaaccattctaccgaatcgaacagctcatcatcaaagcggagaacctgtcgaacgttgtgcacaacacttccaacggggtcatcgagtttggtccggtgttcaacaagcagtttttgctggacatattcgagctgcaggagtcgatcaagaagattgaagcaactacggcagacaacaggaccatcggattgcaggatatttgctatgcaccacttactgcggagtacagaggacctactcagacggaagactgcgtggtgcaatcgctgtggggttacttccaagacgatatcgacacttttgatgccgaagatgaagatccacagggattcccggtgacttatcttgataagttgatgcaatgcttcggcaatccttacaatccggaatgtttagctccctacggtggtccggtagatcccgccattgctctcggtggcattcctcaacctgcctcagcggaagtgaaaccaaagtatgaaaatgcaaatgccgttatattgacgttcctggtaaagaactaccatgacaagagtaagctctcggctgcactgacctgggaggagagttatgtggccttcatgaagaattggactaaggctaacatgagcatagcattcacctcggagcgatccattgaagacgagttgcgacgagaatctcagtcagacgtttcgactattctagtctcgtatatcatcatgtttgcttacatcgctgtttcgttgggacacgtgaatcagtggagtcgagcgcttatcgattctaagattacgcttggtcttggtggtgttataattgtgctggcttccgtcgtagcctccgtaggcatattcggttacatcggacttccagcaacgttgatcatcgttgaagtcattccgttcttggtactcgccgtcggtgtagataatatatttatcctggttcagactcatcagagggacaccaaaaagccaacggagacccacgctgaacatatcggacgaattctcggccgagtaggaccatcgattctgctgacagcggtcagtgagagctgttgcttctttttgggtggcctttctgatatgcctgctgttcgtgccttcgctttgtacgccggtatggccttactgattgactttttcctgcaaatcacctgcttcgtgagtctgctggcgttggacactgctagacaagctgacaatcgttacgacgtgctgttcttcttgcggggatcgaagaaggacgtccctgtgaatgccaacaaggaaggcctgctgtacaagttcttcaagagcatctacgtgcctttcatcatgcagaagcctattcgggtgggagttatggtcgtattctttgggtggctttgctggagcatttccgtggcgcctcacatcgacatcggattggatcaggaactctcgatgccgggagacagctttgtgctgaagtacttccgatatctaggaaagtatctcagtattggacccccgatgtactttgtcgtgaagagtggactgaattattcgcaaccgtacgatcagaacttgatatgtggcgggcaaaactgcaatctggacagcttgtccacacaggtttacattgccagcaagcggcctacggagacttacatcgctaggcccgccgcttcgtggctggatgattatatggactggtcagctgcgtcagattcttgctgcagacagtttggcaacggatcattctgccctcatgatatgacttgtgacaagtgttcgataaacctaacatcctggaaccgtccgaccgagcccagcttccgaagatacgtgtccttcttcctgcaagataatcccgaccccagttgtgctaaagccggtcatgcagcctatggcaatggagtaaatctcaaacagcaactggccagtacgtacaacgatgtcggggcttcgtactttatggcatatcacactatcctgaagacgtcctccgactacttcgaggcgttgcgatcggctcgaaaggtttccgccaatattaccagcacgattcatgcaaagttgcggctcgaaggacgcagcgagtcggaaatccagcaggttgaagtgttcccctattcggtgttttacgtgttttatgaacagtatttgaccatgtggccggacacgctcaagagtatgggcatttcggtgctggctatcttcatcgtgacattcctgctaatgggcttcgacatccattcatcggtggtcgtcgtgataacaattacgatgatcgtgatcaacatcggtggactgatgtaccactggaacatctctctgaatgccgtgtcactggtgaaccttgtgatggccgtcggtatcagcgtggagttctgttctcatctggtgcacagtttctctgtttcgctggaggaaacgcgggaaaagcgagcagccgatgcactgaccaaaatgggcagctcggtgttctccggcatcacgttgaccaaattcggtggaattctggtgttaggcttcgcccagagccagatcttccaagtgttctactttaggatgtatctgggcatcgtgctgtacggtgccgcccatggtctcgtgttcctgccggtactgctgagctatatcggcgcccccatcaacaaggtgaagctggccaaccatcgacggcaggcactgcaggacacacaggaaacctctctctcaaccgtaagcaaaccgctccgtactagttctagttgtttttgctatgattgttgcactagaaccattatccatccgacgacggacccattgcttaagcgcaccaactcggtactagaatgcacggccactgttagcgataatattggtatgaagagcatctgtttggcacgttcccccaaaagtggcactcaaccgtccgacggtcatcggcggtactacttcggaacgttgtctgtacatagtgatggcacaagcaatcatttatcgggtagtactaggaggaacggtaaaactcggatcgggttggtgaacttctggcaacgagtagtgcgtttatggagcggcaacactttccatccggccagcaacaacacaaactactcgaatccggattactacttgggggcgacgctaaagctttaattgtgcactctgattagtgtgtagtgtagtactagagtagagtcattattcaaccgtggtaatcattatcattttcatttaaatgtgtattaacaggatc

SEQ ID NO: 334 - DNA, 901 bp, Aedes aegypti
attttccaaccacaacgaacgagacgctgttagcaatcgggaacaatacaaacaattcggaaaccgtattttaccggtgaaaaactagtggaaaatagtcaactggaaaccaaaacgatgtcggcctccactggcaaggttgtgatcccggtggaatccccagcagaacaggaggagcatctgaggaacgcacggaagctgctgaaggacgtacagaacgtgccagccatgaacaaggagaacgttggaaagctgaacaagcttccgatgtatttgtcgcaggctcacaaggaactggccaagaaatcgctgttctcagatgcactggagtcaatcgagctcaaacggaagaagacgacaacggttcagtcccagtccagtcagacatcgccggagaagaaacccgccacggtaacgaagccaacaatcaccgctgaagacctcacatccctggagggacccagtgagcagtactgggaagtgttggccgaaagacgacgactggccctggaagaatctctggcggagaatcaggagctgtacgagaaggtcagctcgctggaagaggagctgaacctgtcgaaggagatgctccaggaggctcgcaatctggtggaggtgctgacggagcttctgcaggagggcgaagcggaaaaggaagaggcggctgctgccggtagtagtaaggagggggtcaagcaggtagacgacagtggcgtcgctccggagcccgaactacccagcgacgacgaagatctgtttccactgtttcgttgccaccggagcggttagtcgccgtgaataatctaacagaagtatatttgtattaattataactgtacgcgaaatgtggaaaagttataaaacaagaaataaatattaattaagcgacctctttttc

SEQ ID NO: 335 - DNA, 2290 bp, Aedes aegypti
ggctaagtgttggtgtctgaagcggcttctaagtgctttgttacctttagtagcgtaataatttgaaacggattaattttgttatggtgaataattagtgcaaaatgccgaacgaattcgatgcaagcatggataaccgactgcggctagaaggagatgaagtacccgatgcatacgattacgggtacagtgggaaccattcgtaccaccaacagcacccaccgcccgatggcagcaacggaagctcctgtggtggggacgctgtgatgatcaaaatcgatgtcccttcgccggcgcccagtgaaccgcgctttccgaaagaaatttggaaaacgttcatagctcttctcatgctaggcttcaatttcgttttggccacagtttcacttgccatggttcacgatcgggtaccgaatcgcgaaacctatggacccctgccggatgtagtgctggacaacatccgccctttggaatgggcgctcgacgtcagcgaggtcctaatcatggtggtggtgaattcttgcgtccttctgatcactttccacaagcatcggttcatagttatgaggagggttttcctgctgatgtcgttgctctactttatgcgatcgatcaccatgtacgtgacagtactgccaatttccagtacctcgtactactgcagcccgaagtcgaacgcaacgacgacgttggagatcatgaaacgtgccttccatctcatttccggtttcgggttgtcgatcaatggcaagcacacctactgcggcgactacatttacagtggccacacggtgacgctggtgatgggctatctgatcattgctgaatactcaccaaagaagttttggattatccactggcttgcgtggtgtgccagtttgacgggcgtatcgatggtgttgcttgcccacggtcactacaccgtcgacgtgttgattgcatactacgtgacgacaagactgttctggacgtaccacactctggcgaacaatagtcttctgcttaagcaaaacggccacaactatatcggccgcgagtggtggttcttcatcttccggtacttcgagaagaacgtacgcggaccggtaccgctgcagtatgactgtccattaccgattccatggacgaaaagagcgctcaaactgccaaaccgggacagctgatcatgaactgccaccacagaagctttgctagcagacacaagcgaagacatcacagcacacttcagaaggacaacgtggctcagtggaagccaaagcaatagatagtaggtagtgaaccaccgtgtttagctgtttgtagtttaaaatgaaaaaaaaaacctatatactaatacacagtagatggtagcgaaacgaaaagtgtaatgtatgaccatcgaaaaacggaagcagcaaatccaaaacgcataagacttgattatgatcctatttttttaggagttatcgtaagtgtaccaatttgttttaagttgtaaaagtatttagccaattgtcgttccaatcaatgaatgaataactcgtgttgatatttcttttatgtagaaacagtttgtaaataacgaaccatattggaaaaaaataaagtttaccgatttttggtgtagttttaaattgttgtaagttaacattgcttgaataaaaaaaaactgaaacgcaaaatgggattcctgacctctgaaaccaaaactggcagccgaagtcttacttctagtcagttgcccatgaaaatgatagagtcatacaagatgccaatctagtactaacagtacaacaacagtaaggccgaatgcgaatgggcattttacacctaaagtacatcaatagaaaagaaaaatatataaaaaagaaattctaagctgccttcttaccatttagggaaccccgttttaaagagaattatgtatcgaacaccatgtgataatcagtagagacaattaaattttactgtagttgctaggataattacaaaagacacacatataaactcctgtaacaaacaaacagaatcattgatatcgggtagcatatccacttatttattttttgaaaatagggagaattaccgagaggaatttaaatgagaatagcattgatcttgaacagaacatgttactaactactttcaagttgttctgcgaataaacaatcagtgcatgtatcaatactaaccggaacaatcgaaattggcaagtcgtctttgctggtccattctagtttcatgtaagtgtgccttgaactaatcaattcggagcgaatttggaagtgaataaattcgaatatgtacaaag

SEQ ID NO: 336 - DNA, 654 bp, Aedes aegypti
atgcgaaccttttcgacaaaagcgagaaaattcccttgcccatgggatgggtgtgggaaatcgtatacaaaatcctcgcatgtaaccgcccacatgagagtccataccggggaattgcctttcgtatgcacttgggaaggatgtgatggacgcttttcgcgagcggaaactctcaccagacatttccggaaacactccggggagcgagatttcagttgtcccgtgtgcaaggcatccttccttagaaaagatcacttacgaggccatatgaaacgacacaacatagatcgttttctttctgccatagcctcaaaacagggtaacaaagcgaaacggaaacggaaaccttcgattccggcagccaattcgacgcgaaaccatgtctgtagccatccaggatgtgacaaaagctacactcgagctagtcatttgaaagcacacgaaattttacacggagaagttttgccctttcggtgtccctgggaagactgtggccggtccttcgctcggtcattcgaactgtcgcgacatcggaggcaacacacgggcgagaagaagttcgtttgccatatttgccagcaggcgttcatgcggagcgatcacttgtccatgcacgttaaaaggcacatatttcgagcggtcagtatattttaa

SEQ ID NO: 337 - DNA, 1479 bp, Aedes aegypti
atgtccgatgacgaatcgttcatagtgctcggctcgacgccgaccccatccttggagcaatacgtgtccggcaacgtccaacgtcaggaatcgctgccgggtaagacgatggccacttccgccgctcaaaccatctcgaacaatttcagtctgattcgaggggatgagtcactgaaatcattatctccgaaatctgttcaatcggttcaggggtccccaagtggtgtagccagcatgaacggaagcaacccactggcggccagtgtcatcatgggcgaaaccaagtccagcttgttccaaactttcccgagtctgatgaattcctcgatgcctctggacgaaattcaaatgcttcagcacctgatgaacgaacacggtcagatgaaggaaaacctccagatggccaatgtggccatgcggaagaacttcaccagcatccagaagtggcaggaagaggtcaaagccaaatacgcccatcaggttcgactgaacgacgaacaaaatgcgatcatcactcagcttaaggaagataacgataaactgaagcaacttgtcctcgccggagagactcgagtcgcagaacaggacaaacgtgccgccgagctgaagatttccctcgagaaagccctggacgaagtccagaaccagagccaagctgaacgggccgccgcccaggccgaactggacgagctgaaaaaagccctttcggaaaaggaatccatcgtgcggaatatggcccgggaaatcgaacggttggagctggagaagcaggaatttgtgctggttaaaccgaacaaaccggaagcggctgagaaagaggtgcaattcatcaccaaagaggaacacgaccgccagatcaaggtgctgcagcgggagatgtccgtcatcgtggcgaagaatttggagttcgaggacatgaaaaaggtttacatcgatgagctgaactgcctgcgagttaatctgaccgctgcggaggaagtttttggcaaaaatcgcgcccaactggatcgccaggccagagaaatcgaaaccaaagacgtctcgctggcggaaaacatccgtgaactgaacaccctggccgagcaggtggatgtcctcacggcgcagctggacatctataagaacgatttcgaagccgaacgcacggcacgggccgagttggccagcgaaaaggatcgcgtccttaccgacctgaagcttctccagaggcgtaaccaacaattgattgaagaagtgcagaacggaagagtggccgaggagaggacaactcgtgcggccaacgaatccctagaccgacgcgaaccaacgccacctcgagccagctcaagtgccgagggtgccactggtggtggtggtggcgctgctcgggaggaacaaacctacgatcgaccggtcctgtattgtcccctgtgcaaccagggctacagagatttggtcaccctgcaacaccacgtcgaagactgcgtcggcatcaattga

SEQ ID NO: 338 - DNA, 1598 bp, Aedes aegypti
cacaaatcaattttgaaccccattttcgaatcctacccctcgttcgttatttctccttttcccgaactctgacagttccgcttcgcacacgaaagcaaaaaagccgactctcgtggaaggaagaagacagtgcactgaaagacggcagacgtaaacatcgggtttacttgtgtaataccgttttataattttatatccaagtttttcttcgtaaaatagtgtagaaatgcgagaataaatcataaattcttttcaaaagttcagaacaaacataaaccgaaacgatggcacttcgattgcttatccattgccgggaaatcccagcgtttgtgcgatcgactccggtaaacttctgccagcggccgttgctgaacccgtcccagttcgctcaccggtccagcctgctccgatacagccgccaaatgcgcaacaacacccggggagaatcctttgccccgaagcagaccattgttccgacgggacttcagggcgctgccatcgaatccggaggttacattgacccgtcccggctgtggaagtcgtttgtctttacggtggcgtttagtgcggggagctttgtcggcgttacgatatgggagtacgaaacggttcgatcacgggcaatggatgccctgagggctaagttgaatctaaattggttccgggagcgcatgaaggacaaacggcgggaagtggaacagtggcggaaggatgttaacgggtggtggagtaagctgagcccgggagagcggatattcgcgccaatttgtgcgctgaacgtggtggtctttggattgtggaggattccgcagttgcagccgatgatgttgaggcttttcgcgtccaatccggcggcaaaagccgtctgctggccaatgttcctgtcgactttcagccactactcgctgttccacatagcggccaacatgtacgtgctacacagtttctgccacggtgcggtggccaccctgggccgggaacaattcctagggctgtacctgagtgcgggagtgatcgcctcgttcgccagccacgtgttcaaaacggtgatgcgccagccgggcctatcgctgggagcttccggagcgatcatgggcatcttggcgtacgtctgcagccagtatccggacacccagctgagcatcgtgttcctgccgatgttcaccttctcggcgggggctgccatcaaagttataatgggaatcgatctggccggagtgctgctcggctggaagttgtttgaccatgcagctcacttgggaggggcgctgttcgggatgttctgggcgtattacggcagtcggaatgtgtggccactgcgggagcacttcattggatactggcacgagtggagggggcctccgaaaaaataatccgtatgacggggtagataaagtaggtatttgacaatagggacggctcggaatggatcgccttcaatttaacgaagtataaaaatttcgagtgcgttccaactgcttgacaaaaacctaatttgttgagttgtgtgggccatgatttaattttattgatcagtttgaaactgtttgacacgtggcaataaaaaaaatcttgttttgttggccaattacttcgac

SEQ ID NO: 339 - DNA, 920 bp, Aedes aegypti
ttcaggggttgaaggaatccaaacaaccatcgcctgttttggaaggaaaaacaacaccggcagtgcattaaatagagttcgcgtgctttcgacgccgccaacaataacagtgacgacaagagcggcgacgtccaacacaatgcgagaatggctgaaaatctcgctgatgctgtgtacgtttggattctttcgggagatgcgtccctcggaaccgttcgttacggagtttctgtcgggcgaatggcgtgacattgaaccggagcaattgaaccgcgatgtgtaccccatcggcacgtacagctatttgggcctgctggtggtggtctttctcgtgacggatattttgcgctacaaatcgataatcatattttctgcctgcgtcggaatcgtgatatggtcattgctgctgtggaccagcacattggctgcactgcagtgcaaccgtggccaaatatctgcaggaggacagttttggattaattttcggcataaatacgttcgtggcgttggccttccagtccatcctgactgtggtggtcatttccgagtcgggcctgatgctgacgccacgtggccagttcaaagtttacggcggctacttcctggccctggctgcggtatatctcgtgccggcaactgtcagcagcgtgaggcactgtagcagggggaggaggtcaccggagggcgatagtggcattggcgatgaaagtggaaaagttgatccccaaatgatggcaacgcaaagcaaccggcagcagcagcgggtggaactcgaggggagcactcatttttaatcgctttgtaggtaattgttttgaaaaatgaaaaaagcttgttggtgcgatagcaattaggttaatgaagtgttacaatttgaacaaactgtaataaatcgtgatgtgcgcttgtgtttttagttt

SEQ ID NO: 340 - DNA, 1695 bp, Aedes aegypti
atgtttgtggaagatttgcggaaggatttctacgagcggctgatcggcaaacgggttctggtgattgtgaactacgacgtcgatgccatctgcaccagcaagatcctgcaggccctgttcaagtatgacaacatggtgtactccattgtgcccatcatgggttgcagcggtttggtgcgggcctataatgagaacaaagacgacgtgaagtttgtgctgtttgtcaactgtgccggatgtatcgatattctggagctgttgcaaccggacgaggacatgaccttcttcatctgcgactcgcaccggccgtatgacatatgcaatgtgtacagtgaatcacaggtccagatactaggtgcgccgaagagagaagaaggcatcccagaatacgaacagatttatcaggaaacggacgatgaagatgacgacgaaggcgatgacgacgacgaggtggacaacagcgatgaagaggaacggggctctcgagaaatgaaccggattcaacgcatcgagcagcagctgctgaaacgccgaaaaaggcgcgaatgggaagagaaacggaaccagctcatgtttgagtacacccagttcaactattatgggagaagttcggcgttgaccattttcgagctggcttggcgtttgtccaaggactccattgatctcctctggtgggccatcgttgggctgacggaacagctgctgatgggaaagatcgaaagcgctacttacacattggctacggaaagtgtccaatcgcatgtatctcgtctcaccaacaaggccagcgatcagacgatccaaacgtccgttaagattcactacgaaaacgatctccacttggcactgtataggcattggagcgttttggattcgttgaagtactccatctacccggcgtgcaaaatgaaactgtggacctacaagggcgagaaggtcatgcatgagttgctggtcgacatgggacttcctctggtgcaagccaagcagacattcaacgccatggagctggagctgcgcaaagaattctacgacaaattggaaaagttcgccgaaaagtatcacatgccggacataatctacggttcgttcatccttcagtacggctaccggaacaagtactccgccgcagattacgtctactcaatgctagccattctggaatctatcaagaaagaccgcacccctgaaacgtgcttccttgaatcgatggatgccctttcccggaacaacaaggacatcctcgacaatgggatcgatatgtgcaaaaccctgctggcggccatcttcaaacaggtccaaagctccctcgagatgcacgccgtctattcggccggaccgttcctttatttcatcctgcaggaggaggtttcgtttttcacctgtccgtacggtttgctgatgttggctcggttcttgctgaacggacatgtggccgtttcgcgaaatcgtcgagcgcgggaactacctctaattgcggtggcaccaatcgacgtgagtcgtggttattcgctgctggtcggtgttccacctgtatgcgaggacagcaagatctttttcggtagggctttcgaacaggcggctctcaaaagtggggccaccatttcgcaggactttttcgaaccgaccgtcatacagatacgacaggccgactgcactaagttcctcgatgcactgacggttttgctaggttag

SEQ ID NO: 341 - DNA, 897 bp, Aedes aegypti
ccgctacgtggcttgccgttctccactgaagtgctcaaaactcaacaaatcctcaaccagtgtgcattgaaaaaacgttcctaccacaaaatgaacccgaaagccgtgcttgtgttcgccctggtggccgtttccgcttccctctgccgggccagttcctgcagcaacccggaggtcaagtccagcttcttttccacttccgatgccaccatcgtcagccagattgccttcgtgacggaattcaccctgaagtgctccaatgccggagccgagaagctgcccctgtttgccgaagtcggtggaaagttggccccggttgtccgcgttggcgacagcaagtaccaggtcagctggaatgaggagatcaagaaggccagcagcggcaaatacaccatccggctgttcgacgaggaatcatttgccgctgtccgcaaggctcaacgcgccggagaggacatccagtcggtgaaggccctgaccagcgtggtcgtgagcttccccggtgcctacaagggaccgtggatcaactcggaaatcctggccaccggagttgtcggattcgtggcgtacgttgccttctcgacccgcagcaaactgttggcgtaaggaggatcattgcagtgcgcaagggaagagatttgagttttagatttatacgttcaccatcatcgtcgattgagcgttttttttcttttcgatttttttcatcgtgagcattttttgttgttttctcatacaagtagggaacttaatttaatttataaaaaaaataatttgtttgcatgaggaattagcagaaaccgatttattgctaacaccggacacatgttctagatgtgatccaaaaaggcttctcaagactggagtaaaagcgtgcgaataaaatgctaaatgacg

SEQ ID NO: 342 - DNA, 2594 bp, Aedes aegypti
atattgaagtcgtcgcagaggtgatatattaacgttgatcgctagtcgttatacagttgccttcagcctgttcttgggagttgaaatccccagtgaacaaccgtggttcaggaataactgagcagatgtgagagtctctgcaatgcaattcttagaaaaacattttcaaattcacggagaggatgctggaataccacgtctttcgaatggtgggtgcaaaattgatggtcattttgtttcagtcagtaatggtttcagacacaccgtgtatgggattaacttggcatgggcattgcgttacacacgttgttcattccttcgtccgttcggtcggtcggttcggttcggttcagctcgcgctctccctttcactccactttattggtggtgttgttacaacaaccattcaaccgcatagtcgcgcattcatgaatctcccgtccgtcgacgagagatccattaatgcgaatgagtctgtgcgtaggcagtctcattcaggcctttgatgggtccacctcatctgttgtatagggcttgtttttttttgctgctctcggtcgtcgggttgtattgtcgcggatgcaagattgtggaagcagtctttcgagtgtctcagaagtgatcggtccgaaattgtgattggttgaaaacctggaaccaagagagaagttcccatgagtgcagttttggacacctcaggagagcttaactttctcacccccaactcggccaaggacatccagcgcgagttcaccgccggtatcaaggaacgttgcaaaatcccggtgatcaactgccaggcagtgacgaccgtgttggatcccgtgacaggaaacatcagtaccgttctcacgacgacgtccccccaggcagaaacggccaccacggcggtcgccagcaagaagcccagctacctgaatctggcctgctgtgtgaatggctactcgaatctgacgacgtatgattcgaagctgaggcaggacatcaacaagtcccgggaagtctcgccgaatcggccgatcattgccacgctgcactacaatcggtcggagggtggcaatttccagctgaccgcacccacgcttagctacattagtatgaacaatactatcaataacaacgttagcaacgggggcaaattcgtcggaatggtgaatggagcgggacggtttgtgggtagcggcggtggtgctgctaccggacaggatgtgacggataatgccatgttcaatgggaatggatttggtggtggggggctgcggaccagagtgatttcttcgcagtcccaaattagcagtgtgaaggaaaccgaaagagtggttaagaagagcttcattcagcagcgtgtcgaaaagctgtatggtaacgcggaaggtgtagtgattaataagcaaatctacaatagcaatgagaggaaatatttgaacaacattgccaacgaaaatgtgagcaaaaactacaccaatgtgctgcatctgaatgggaacggaaatgtggccaccaatggaagtagtcacggcactgttgtcggcactggaggcggtggtgtgggttttggcggtggaacaaaagagaatctcgatgaaaacaataaggaaatagccgatgatccagatatggaagcgctgccggtgttgcggcatttgaggcccgagttccgagcgcagctgcaaatcttttcgcccaaaaaagttcccaagacatcgccgagccggtctgttacgacgacggctgggagcggcgctgtcagtctcaatggcaccaacaacaatcacatcattcccaacggggatctaagaaagaatggccatcactcgacgacggtggacgaggacaaggagaacgtcaacggcgctggtctggtgttggatgttgcaccagccaagacccaactcaaagatggaaaccactttctgcaggtgctcaaaaacgaacagaatcggctactcacaatggcagccaacatcgagagggacgttgaacagtcgaaggccgatggtgtggagatcagcgaggaagtcgccggttacgtgctggtagctgcaggcaaggcacggctgctatgttcccagaaaatgaaacagttcgaaggtctgtgctacagcaatctgaaccaatcgcccgatgaaaagttccaaacgacgtgcgaggatttgcgtggtttctgggatatggtgatgttgcaggtcaatgatgtggatgcgtccttcagtgaaatcgattctttccggagaaatggctggaagaaaccgacacccaaaagtcccaccccacaagtacgcagcactgcgcgaagtaccaagcttacgaaacggcccttcaagtcccctgccacgacgtcgaccaacggaaccggtaactcggcggacggctcagcagccgatacgaaaaaagctgctgctgctgcggccgccgccaaacgcgaagcccagcggaaacagctgatggagcttaagcggaaacagaaactcgccaacagccaacagaatgtggagatattcgttccgggggcagcagccaccaatggaacgacaccggttgcaactgctgatacgaatggtgcctcgtcaccgcccctagtggatgcgagttga

SEQ ID NO: 343 - DNA, 5596 bp, Aedes aegypti
atttgcgtctgtcatcagtaaagtgagaagaaaacgttcgcatgattttttttcttcactgtcgtcgtctgtcgaacccgcagagcagcagccagaagagtggaaatttgcagtcgtcgtcgcgttcgttgtccgtgtgcgaaaattattaaacttggtagaaagcttcggcgtttagtggctggctggcaagtaaatcgttccaaagtgatccagattccaatttccgccgggatcaatcgcgtccggagtgagtgactagtttcgccatcgagattggtaaaaaaatcgaacaacgacggaagaaaggaaaagaaaaatgtctggcgattgattcacgcctcggctcagccctccgcggtcagaagaaggcaaggcctgctgctgctggttgcgcctactactgctgctgcttgctgcaaatggttttttgaagtttcaaattttcgcttcgcgtgtgagtgtgtataaaatgcgaaaatccaagaatatgtagtgatttttattttcactttatgtaggcccaatgatatttaatttgtacgcatcctagtgttggaagagtgtgtgttgtaatctgctgttttcagtggaagaaaagtaaaacgaagggaaatattctatggacagcgttccaaagaaataaaaaggacttgcccaagagtccgtcagggaagaatcaatccttcggtggggttccgcaatcacgtctctgtcggccaccgtgagtttccttcagctcactccttttgttgctgccttgtgtgaacagccagcactgtgtgaagtggtgtgtatttggtatatattttttgtgtgcaatcgccattttgtgctccgacggacgacggaacgaagtgaaccaatcaaaacgaaagggaagaaagtctccagtgagggccccgtggccagaactgccatatccttcggatcgtctgcttccggccagagcagtgattggccacacgaaatcatccgcgacagggatcgttcagtgagacttgtgtacgtgaagttctacaagtagatatcgtggtgtccaacaaaacgtcatctcgttgggaggcgctccccaaaatatgctgccctagcttgggattttttcttatcggataacacaacgctcttgttcatcgagtattcgcaggatattacctaagacgatggactcttccgcagatctgacaggaacctaaaaaccccacaaactaatcggaccgatccggatccccagtttgacacagaagctgcatcattcacccacagtgaaaatgtgcagaaggtggacaagatctgatcaagttagtcatcctcccaatagtgacaatgcggtgcagtgttcagacgacgagttagtgttagagcaaaaatagcccagtcggcaccgagtggtctaatcaattagcaaacacatgacaataatcggaagagtggagtgtggaaaaagggtggcgtacaattcatcatcgccatcgtttgttttaacgccaaagtgcaagcaccagtaaagcaagaacataaacatcaacgctgctgtggctgatggtaccacagggtaccgaattcagattggaagaaggtgaataaatcgaagcaaagtgtgatccttggtagggaggaaaaaaagtgacgtgagtgaagaaagtgtctgtgtgcagaagcgaaacgcattattactcctaaagctgagtcttcttgcttccccgctgcagtactacttccgatagtagtatgcctataatgaggccgggaagcctgaaggatcccgagatagccgagctgttcaacaaacatgacccggagaagatattcgaagatctgcgcgaaattggccatggttcgttcggtgcggtctattacgcaaaatgcaatctcacgcgcgagattgtcgcgatcaagaagatgtcctacatgggcaaacagagcatggaaaagtggcaggatatcctgaaggaaattcgtttcctgcggcagctgaaccatcctaatacgatcgagtacaagggatgctacctgcacgagaacacggcatggctcgtgatggagtactgcgtgggatcggcttccgatataatcgaggtgcacaaacggcccttgaaggaagaggaaatatcggccatctgtgacggagtgctacgaggattgagttatctgcacagccttggcaggattcatcgagacatcaaagcgggaaacatcctactaaccgagcaaggtatagtcaaactggctgatttcggcagcgctgccatcaaatgtcccgccaacagttttgtggggacgccgtactggatggcaccggaggtgattctggcgatggatgaaggccagtacgacggcaaggtggacgtgtggtcgctcggcattacctgcattgaacttgcggaaaggaaacctccctacttcaatatgaatgcgatgtctgcgctgtaccatattgcgcaaaacgaggctccttcgttacaggctccagactggtccgatatttttcggagttttgtggatttctgcttgaagaaatccccaaatgagaggccaaattccagtaaactgttaacccattcgttcatgacgaggatacgatcgccaaatgtactgattgatttaatagcgagaactaaagctgccgttagggaattggacaatctaaactataggaagatgaagaagatcctaatggtggattcttgtgaaaccgaaagtaatgtcggggacgcggaagacacgccggatgagcagattggcggtgatagcagcaagagtaatagtataacctcggaacattcgttacattcggtggatcatcatggaggtgtgttacggaatgcatctaggcatcgaatgccgggcccaggcctgcccccgatgcacaacaatagtatgaacaattcgggcggtcgcgatgggctaatggtaggcgacggtctgaaccgaatgagtctgggtgtgagcggaggaagcggaggcagtggaatgggcagtgggggactcggaggaagtggctccggatccggcagtatgggtgctagtattgggtatcaaaattcgtcatctagtcccgttgtacctcatcatcatccgcatcataatcatgtgtcgcaggcggcagcgaatgcggttgccgagcatggtgccaacaattttgctactattaggacgaccagtattgtgacgaaacagcagaaggagcacatgcaggaggaaatgcacgaacaaatgtccggctataaacgaatgcgacgggaacatcaggcagccttagtgaagctggaagaacggtgcaaggttgagatggaacagcataaaggagcgttggacaaagaatatgatctgctattacatagtttcactagggatctagataaactttcgggaaagcatcagcaagaaatcgaccgaaggataaagcagaacaacgttgccgagaagaaattgtacaaagagatatcgacacggcaagaaggcgaccgcaaagcgttcgaattgcataaaaagaaggaatacaaagcaaacaaagaacgatggaagcgagagctatcgatggacgattcgactccgaagcggcaacgagatgctacacttcaatcccagaaagataatctgaagcaagcggaggctcaagaagagcagcgaatgctgcgagtacagaagaactacatcgatctggagatgcgaaagttccggaggaaaaagatgattcttctgcacgatctcgaaaaccaactgctgagagatgaactgagtaaaaagcaacagcagctggaacaagcccatggcatgcttataaaacaccatgaaaagactcaggacttagaataccgacaacagaagagtgttcacgctctccgagaagagcagatatcaaaacaacatgaaagtgagctgcgtaaccaaaaggagtacatggatagggcggaacgggagctgttgaggaggcatgcgctagaactcaagcagcaaccgaaaagtctgaagcaaaaagagctccaaatacgcaaacagttccgggaaacgtgtaaaacccagacgcgtcagtacaaggcactgaaagctcaaatcctgcagacaacgcccaaggaggaacaaaaagctgtgataaagaaactaaaagaagaacaacatcgtaagttaacgttattgggtgatcagtatgaacaaagtattgctgacatgctgcagaagcagagtttgcggctagacgaaagtcaggaagtcgaatgccatcagctgaaggatcgcttgcagtacgagctggagatcctgacggcgtaccagagcaagaatcggatgcaagcgcaggcgcaacgggaccgcgagcggaaggagctcgaagaccgcgtcagcgtgcggcgtgctctgctggaaagtaagatggagaccgagttgcaacagttcaaccaggaacgagcggagcggattcgtatcctccgggagcgacacgaaaagcaactggaggcgttcgacgaggaatcggcacggatgggcttcagtgcactggcgttagccgaagcttctaaagaaacctacccggacgaagagggcagtctgtccgggtcaatgcttagcttggcccatagtagcagttctactagttttccggcaggttcgctatagcataaatcccgctgtacgctacataccctatcgagtcacaattcaatgtagttgatggtggacggcggtctcgaataatgttagaatcgagcgcatggttgggcagtgttaaggaagcagcattcctggctgcgtttgtgtagtgttacttgtcccgtgggttgcacggttcggtgagagtggcgacgtggggagtccccaattggggatgttcagaatgatgttgttacatttttgatcgtgtttctataagaacttagtgctgcttaacagtagcactcttgtcgagcaactttgatgtttttttttacctattattttaacaagcttttttgtactgtttataactagaaaataatactttacgtttgataaggtcaatcatttcttctgaattctagtcaattggatccgatcgattgaggaagtgtagtaggtggagttcgaagacggttagaataaggaacgcgctagaatgactgtgagcccagctttagataatactcatgattgaattcaaaagattcctatttgctatggcgttatttaggttcatttgagcgagtgaaagcgtttgcgggcgctcaattccatctgtaaataatcctaacacattcgcttgtagtatcaaatgccgcaaattgctttctataaatataccggggcctacgtttttttacgccaatctagcaattattttcaacgaacgaacgaacactgaatacactttctctgtaggatattcctaatttatcttactgctgccgatttcttgtatatttgacgcttcttatttagtatttttctcatttatgcgctgccaacgagacatttttacgcaaaacgataatttttgacacttatccactactactactactactacttattattattatctttattatcgagactttcagcctgtggctggttcgtcttcatcattgtgtaagagagggcttcgcgtttagaggcccccctg

SEQ ID NO: 344 - DNA, 1696 bp, Aedes aegypti
cagagttggtagcaggtctcttttcagaggagactttgtcagtattgtaatgcaggtctctgaaaagtctctgattttaatggaagttgttcagatccgagatcttgatatgtcttgatatgtcccacgtaacggttcgggaaacgtcaactaatgtgtgccttactttgtttgtcgttttcccgtcaggattcgcacggaaacatgggcctaacgttggaagggaacaaacgcttaccggtcgaggtggtaccaggcctcaaatcggtggacatcgcatccggtggagaccacttggtggtcctgagcgaaaacggccacgtgtacacagttggttgcgccgaacagggtcaactaggacgtatttccactcgggccgcatctggcgaatctcgacgtggtaaaaccgatctgcttcaaccgggagttgtcacactgcgaggtaaaaaagtcttagcagatgcaatctgggcatctacctattgcactttcttcagggatcgcaacacggccaagatctttgccttcgggttgaacaactattgtcaactcggcatcccgaatccgagcgaaaatgtcgttaaaccggtattcgtacctgaacagactagtttcaccgatgtgaaatctatcgccggaggacaacatcacacgttggttttgaaaaccgacaacaaagtgcacgtcattggccgcaaagaatacggtcgcctcggcctaggcaatgtgacggaagacgctaaagttgtgaccccagttgaagctctagcagacaagaatgtggtagagatctgctgtggcgaaagtgcgtcctttgccgtgacagacaagggtgaagtctacgcttggggaatgggctcgaatcaacagctaggaactggaaacgaggacgatgaaaccacaccagttcaaatcaacagcaaacaagtacaaggcaagcgaattctcaaggtttccagcggcggtcagcatagcttattcctggtggaagagaaaccagctaaggaacctactcctgtgcctgaagctaagcctaccactaaagctaacaaaaaagccaaggaagtcgagcctgtcgagaaatcagcgccggaagtagaagataaaccaaaaacgaatggtgcttctacttcagccgcgaaggtgaccgccgattccaatggtggtactaagacggaagaaaacgaggaagacgagaaagagaagccacaaatggaaagtagtgagactgacgcggctgcggaacccgagaagaagccagctggccggggacgcaagcgaaaactgtgaacgcaccgtataatcgggactagttaaacctgttcagtactagcgattttataggtttagttagaaacaattacgtaatgatagaaactaagtgtttagttttgtgaaataatcatttttatcatctcatggtaccgcgcctcattcgacgttattcgttctgtattacatttcttaccttacatctgttgatttatttccgtttctacatgccagtgttttcgttctactctatttacgtagtcatactattgttcggtaacgcagattaaaaagacaatctgattgaaagagaacaaatattgacctacattgattatgcgttggaaaaaaagaaaaaacttaaaattaatttattaaaatcattactactcaaaccataagaataaaaacttgtaaaacatga

SEQ ID NO: 345 - DNA, 1600 bp, Aedes aegypti
cgtctcaacatggattcgattccacggaaaagcatcccggagacattcgccggggcagatgtgttcataaccggtggttccggattcatgggcaaggtgctgatcgagaagctactacgatcttgtcctcagattggaaacgtgtttgtactgctgaggccacgaagaggaaaattggccaaggaacgagtcgcggatttggttcaagtgccgttgttcaacaagttacgcgaagaacgacctgatacgttccaaaaaatcgtcccaatagatggagattgtgctcagctgagactgggattggaagatgagagtatcaggcgaatggccggtgttcagttcgtgtttcacgcagctgccagtgtacgattcgacgatcccctggacaaggctttattgttgaatacccgaggaacacacgaaatcttacgatgggctaaaactttgagtaacctgaaggccatagtgcacatttctaccacatactctaacccggaggttcctcatgttgcggagcggatatatccagcaaaaatggattggagaaaggctatagaaatggtggaaaaggtcgatcctgaagcgctaaacgcgttagccgagaaattatcaggttttgctcctaatacctacacgttcacgaaaggtcttgcggaacagatctgctacgattatcaccatgaacttcctctggtaatctttcggccgtcgattgtgatcaacaccgagacggaaccaatgccaggctggatagaaaactacaacggacctgccggcatcctttcagctcacgcggccggtattctacggactttattcgtcagcatggattgccatatgaattgcatcccagcagatgtcagtataaaggcgattattgtagctgcatggaagaagtccttcagcgccaagaatgacctagtgatctacaacagtgctgctgaacccgacaaggcaatgggatataaatttctgtacgaagaatctgactacttctctcatcgaattccgatgttgaagatgatgtgggctcctaccggacaagccacaaccaatagtacgttgttctatttgttgttctttttgtaccaggtcattccggcattttttgtcgatatagtgcttaggctttgcaatatgaaaccattcctcctgaaactgcagcgttcgatcttccatgcccaaaactctctgatgtacttcaccacgcatgactgggtgttcgataccgacaatttccgcagcctatccaaggatcttggcgagatggacaaaattcatttcaacattgcctacattacgcagggtctgctggagtactgcagtctgtgtatgctgggcgggcgccggtacctgttcaaagaaagcgacgactccatcatggttgctttcaagagattgaagcgattcgaactggccgacaaactgctgaaattggctatgttcgttggattcgcatacgtgctacggagttatctgcctgatagctggctgcaacgcgaagcggttgatggtagattaaacgaaattttatcagattgacaaatgtcagctttcatctgaagcaaaagattgaatgaaaaaatcaaaagtttttacg

SEQ ID NO: 346 - DNA, 2010 bp, Aedes aegypti
atggatatcctcatcgagccagactgttacaaggtctgccgcatctgcatggagaactgcgaggaggactttgtgtgcgtgtacgatgagtttgaggataacatcctgatggacgtgatcgctgagtgtgcccgcgttgagataaggaaagacgatgtactgccacggaatgtctgtcggaactgcgccgagtatatgatcgtggcctaccacatcatccagaagtgtcgcgaatcggatcaaacgttgaggtcaatcttcaagcatgagatcgatatacacagccgcaaggacgaggagaagccattctgtgcgactgatctgcaggaagaggacctcaatccggaggaatatgagtttctactgtcggaggcatacgacaacatgatattggacaatgtggaagatttgataggtgaacaggtagacgagctgccaagtgactttccagatttgggtcatgtcgacgatgagaatacacctccactgctgagcaccgtcaaagttgaacaggttcagttggggaatacccaagttgatcaacaactcgtacaagtagaacagccacctgttgacacacacgaaacaaagaggtgctgtggttgtaagcaagagttcgaaacggagaccgaactggtgcaccacagcaatgcagtgcacttcaacgagcgtggcaatatcaatgatcccaccaggcccttccgatgccacatatgttacaaatcgtttgtaacgcttcagcatctgaaggagcaccaacgaatcgccgtccgtaaatacttctgtcgacagtgtggaaaaggtttcatgacccaatcgaatctggagaatcaccacaaatgccactacacatccgcagagacgaagaaatgctgcggatgccgcagtgaatttgaaactgaagaagctctcacagctcattctatccaggttcacaaacccgagcaaatggttgacccaagaagaccgttcgaatgtgcagtttgctaccgtcgttatccaactcgcaaatctttggtcagccacaagcgcttgaaccagcagcatcgttgtgcgcattgcggagaaatcttcgccaaaagaatcttccttaccatccacgaacgtaactaccacccggatgcccctaaggaagaagaccccaagagacgttgctgcggatgttaccttgaatttcccaacatggatgaactgcagctgcacgcctcggccacccacaaactccagcgcaatcagattgccgatgaaacgaaaccttacgagtgcgacatctgctgcaagcggttcatctccatgttcagcttgcaccaccatcagaagaaggccaatcagggcagacgttacgtgtgcgaagtgtgcggtcgttcgttcaaccgcgccttcgacaaagccaaccacgccacaacccattccaacgagatgccattctcgtgcgaaatttgcggccggcggttcaagaacaagctctacctcaaaaaccatcacaagctgcacaccaccggtgaaacgaaggaattcgcctgccccgaatgtggcaagtgtttccgcaccaaggatctcctcaaaacccattccattacgcacagcgaagaacgtcggttcgtgtgcagtctctgttccgccacgttcaagcggatgcagtgccttagaattcatctcaagatacacaacaaggaaaaaccgtacggatgtactctctgcgaacgtcgctacacccagtcgtcggatctgaagcggcacatgctgacgcacagcaccggcgacgaggcgcggccctatcagtgccaatactgtctgaagcgctatccacgcaaggattacctcaagattcacgtcaggaagcagcacctcgagaaggcggatctgacgctgatcgaggagatggcctttgagctgcgggaccacggagacgatagcgactttttgctcatttaaaattttatcttcggggagatgggtttagagaaatcgatgaataatatggcaataaaaagcagaatttttagtacg

SEQ ID NO: 347 - DNA, 2842 bp, Aedes aegypti
gttcaaatgtcactaagctaggcaacacacggaataagagcaggtcccgatactcagtggttcattttaccgaatatttccaaggtgctattaaagtcatagtcatgcaacgttgcgcattttgtattatcgttagacaaatataactcattaaataccgaatttgagttcgtacacaacggatgttttaacagcaaatttgaacatagtgttcagctttatttcccccgacaagctgtgcatgtaacatcagactaccatcgtagtcactcacctcgccacgcgttatcagacttgttgggctcactctctctctagcggatcacacgaccgaatttctccacaaacccatcggtcggatttgagagacctacatcgcttctataggcacgtaggtatatgaacccaccgaggggaccgatactatcaaagaagcaagaagagagctttgtgttgtgtcattaaccaggcctgggccaggcaggctttagctacccgaaaaccaaaacaattacttgtattggaggaagaaagaggcattcaatgccatccagtcaatagtgtatagctatctgcgctccgtacttggcggatgtccctccatattcaaatctgcacttttagcgtcgagtcgaggccgagcattgcatactggtgaattttataacatggtgatggtgtacatcgagcattttgaattcttcgctgaaggatttttatgatgagctgttatagttaaactagactgcatttgagccatattctgatcggggggaagtagaggaaggagaagagatggatatcctcatcgagccagactgttacaaggtctgccgcatctgcatggagaactgcgaggaggactttgtgtgcgtgtacgatgagtttgaggataacatcctgatggacgtgatcgctgagtgtgcccgcgttgagataaggaaagacgatgtactgccacggaatgtctgtcggaactgcgccgagtatatgatcgtggcctaccacatcatccagaagtgtcgcgaatcggatcaaacgttgaggtcaatcttcaagcatgagatcgatatacacagccgaaaggacgaggagaagccattctgtgcgactgatctgcaggaagaggacctcaatccggaggaatatgagtttctactgtcggaggcatacgacaacatgatattggacaatgtggaagatttgataggtgaacaggtagacgagctgccaaatgactttccagatttgggtcatgtcgacgatgagaatacacctccactgctgagcaccgtcaaagttgaacaggttcagttggggaatccccaagttgatcaacaactcgtacaagtagaacagccacctgttgacacacacgaaacaaagaggtgctgtggttgtaagcaagagttcgaaacggagaccgaactgatgcaccacagcaatgcagtgcacttcaacgagcgtggcaatatcaatgatcccaccaggcccttccgatgccacatatgttacaaatcgtttgtaacgcttcagcatctaaaggagcaccaacgaatcgccgtccgtaaatacttctgtcgacagtgtggaaaaggtttcatgacccaatcgaatctggagaatcaccacaaatgccactacacatccgcagagacgaagaaatgctgcggatgccgcagtgaatttgaaactgaagaagctctcacagctcattctatccagattcacaaacccgagcaaatggttgacccaagaagaccgttcgaatgtgcagtttgctaccgtcgttatccaactcgcaaatctttggttagtcacaagcgcttgaaccagcagcatcgttgtgcgcattgcggggaaatctttgccaaaagaatcttccttaccatccacgaacgtaactaccacccggatgcccctaaggaagaagaccccaaaagacgttgctgcggatgttaccttgaatttcccaacatggatgaactgcagctgcacgcctcggccacccacaaactccagcgcaatcagattgccgatgaaacgaaaccttacgagtgcgacatctgctgcaagcggttcatctccatgttcagcttgcaccaccatcagaagaaggccaatcagggcagacgttacgtgtgcgaagtgtgcggtcgttcgttcaaccgcgccttcgacaaagccaaccacgccacaacccattccaacgagatgcccttctcgtgcgaaatctgcggccggcggttcaagaataagctctacctcaaaaaccatcacaagctgcacaccaccggcgaaacgaaggaattcgcctgccccgaatgtggcaagtgtttccgcaccaaggatctcctcaaaacccattccattacgcacagcgaagaacgtcggttcgtgtgcagtctctgttccgccacgttcaagcggatgcagtgccttagaattcatctcaagatacacaacaaggaaaaaccgtacggatgtactctctgcgaacgtcgctacacccagtcgtcggatctgaagcggcacatgctgacgcacagcaccggcgacgaggcgcggccctatcagtgccaatactgtctgaagcgctatccacgcaaggattacctcaagattcacgtcaggaagcagcacctcgagaaggcggatctgacgctgatcgaggagatggcctttgagctgcgggaccacggagacgatagcgactttttgctcatttaaaattttatcttcggggagatgggtttagagaaatcgatgaataatatggcaataaaaagcagaatttttagtacgttttttgagtagcacgtgctgttgactagagaaacca

SEQ ID NO: 348 - DNA, 3247 bp, Aedes aegypti
atgaacgctgaactaaatttgtttgctttactgtttccaattttagaaatctccgaggagaatttgtacgatcacttccaagattgtggcactattgcattcctgcagattcgtactgacgattttgcctacgtgaccttcgaggacaagtcgtcggtgaagaacgccatgagcaagaacaaccaacccctcaaaggttcgagtcttaagatccaacttctcacccgtaacctggatattatgattgtcagtttggacacgctgccgtcgcgtatgcccgatctgtaccggatgctgatcatgccactggagcctcgggcttcttccggtgaacagcagcaacaacaacagcctgctgtccaatctcaacctcctgttgaaaaggccaacgcccttgctggaaaacagcagcagcagcaacaacagcaaaaacaagctgtaccagaacagcccaagccaattccaaaacctcaggaagtaccgaagaaacagcaagaagttgatcccgttcccgcggcgtcatcctctcaatccgacaccgatgacgtccagatcgttgagattgtggagactcagcaaatcatcgaagatgacgacgacgatgatgaggaagtccagattgtggaaaaacctacggtggaaccgatcccgtcggactacgtggcgaaaccggacgacgtgatgcgcccggtcaaggcatccgagctggtgctgaaagatgttccgaagctgaaaagcgaagacgatcgtcgttccgtgtgggtcaacaacatccaaccggagacgcgtcgccttgatctagtcctgtacatggagcagtttggcgacgtgatgcactgcaagatcggcaactcgaacaactgtgcgttcacccggtgggccaagatcatgttcaccaccgaggatggggccgccagggcagcggagtatttcctgcacccgttccagggccgctacttgttcgttctgcaatgctccaagtatgtcgttgaggagccgggcaaggtctttgtaattgattatctgtcgaagtacgtggtttacgaagatgtggttaaggctttcaaacacatcggagaggtgttctacttggttcggttgtacgacaacaattacaaggttcgaattttcttcctcaatcaagtggatgagaaagctgttctggccgtggattcaatcgatggccgtccagctaaactggagctatacatcgagaacatggtattgagattgcccaaaacgttagctaaggagctcaaagaggcacgagaaatcaaggatccggagaaagaagcacgcatggctaggatcactgaaatctacaaagaggaagcgctcgaccgttacgccactcgagagtacaccaatccggatccgaaaaccagtcctgtcgaggttgttatctacaacgtccctgtgggcacaaccgatcagcagatcaaacggttcttcaaatccatcggagaaccaacggcgatccgccgcgtaccgattgaaaccgaaacgcacactgtgcgggacgccgagtgcgtgtatgtcggcttccggacgctatcgatggccctgcaggctgccgagatttctccggagcggacgctcaactcgttcaatccgttcatctttactgcctggtcgcaagccgccatgaccgaccggaacacgattcggttgttcttcaacaaatatatttcaatgcaggacatctacaacgggcttattcactgcggtcagatcaaatacatcgagaagcagagggccaaacgggcgctggtcgtgttcggcaatggcgagaacggagtgctgaatgccaagaggatgaactttatcggtgataccaaaatcacctgcaaaggcgcattcgttgcaaccaggctagatctgcatgccgagaagaaaaagaaacaggcggaggccaagcaaccacctgcagctgcaatcgttatcgaggacgaggacgaggtggtcgttgtgccgtcggagaattcaccggacaagaaccagaatcagaagggccaaaaccagaaacagggtccatcacccaataagcaacagagacaacagcagcaaaggtccggaggcaatcgaaatcgtaactccaattccttcggtgacgatggtcctccgcatcgccatcagcagcagcgtaaccagatgaacccttggcagaacaacaaccaaggcccaatctggaacgatcaattccagcggcgcgatcaattcccgcacaacgatgagttcaacttccaacgaaaccaaaatccgttcatgcagggcgatcgcttcaatccagatggtggtccgttcgatcgcttcggcaatcagggtccaaacaggaacatgaatatgaacgagttcgagcagatgatgatggcgcagcaattcgacaatttcaacctgaacagcaacaatggcttcaaccgtggcaatccgatggattccgatgaccctccgttggggcgtccctggggccaaaaccaacagaattttgatcgcttcagtccaccaggacgacgttcgccgtttaaccgtgaattccccgatgaccacgatcaagatttcgacagggattcacccggtatcccatcaaacattccggaagaagacatcgatgagtacatcttgcgcaagcaggaagccatcaagcgtcggctggagcagctggataggcagttgatcacctcagtggaaacttcccgtcagcgcgactttcaacgtgcggcccggcatcgccagggaaccgtcttcagcgataatggcgatgtgcattacgttccgaatccagcggcagttgcccggaaccgtggtcgtggtggccgcggtggcaatttcggcggtggtcggagaggcggcggcaaaggtggggatgctgccgaaggaccctccagaggtcggggacgccgtgaccgcaatgaactgatgaaaaatcgagccagagatccatttgccgatgtggacatcgtacctatcatccggatatcggaggaccgatcgccatcgccgaagcgaagccgtgaggatgagtttgacgcagcacagttcaacgctgcatggaactaggttagaagagggcactcatctcggacggtactcgaaagggacgagtaccgctttaattacaatgtgtgttttaccattatggacattgcaatgatggtattgactttaaagtacgattgaaattcgatatgtattatttaactcggtggtaaacatccatacttacatatgaagaaaaacctagtaaatt

SEQ ID NO: 349 - DNA, 1721 bp, Aedes aegypti
aaactcgtcgcaggtacttacaacaaaagaaaggaaaaaaacatccagtgcgtacatttactgcggaattaaatgcgaaaatctccggaaaaagtggctgccgtttgtgtttgcttcgttttcgtcccagtttgatcctgttcggttccgcttccggtagctgtttctcgttttctgcagaagaaggaaaaatccatccagagccacaacaaccatgtcggaagaatatgattatctcttcaaatttctcatcatcggtcgggctggaagtggaaagtcgtgcctgctgcatcactttatcgaaaacaaattcaaagaggacagctcgcacacaatcggtgtcgagttcggatcccgcatagtcaacgtcggtggaaagtccatcaaactgcagatctgggacacggctggccaagagcgattccgttcggttacgcggtcctactacagaggagctgccggtgccctgctggtttacgacacaacctcccgagacagcttcaatgtcctctcgaactggctgaacgatgcccgaacgcttgcctcacagaacatctgtatcctgctggtgggaaacaagaaggacatggaggaagaacgcgaagtaaccttcctggaggcgagcaactttgcccaggagaatgagctgatctttttggaaacgagcgccaaaacaggcgagaacgttgaggaagcattccttaagtgctcgaagacgatcctagccaagattgaaaccggagaactggacccggaaaggattggcagcggtatacagtttggggacacttcgaaacgaagtggagcgggccagtccggaagtcgacagcagagtagcggccgacgccggacaccggattgcgctggaggatgccgcacctaaatggcaaaaacccagtgtcgaaatatatagctttttttccgatatctttcgtctatggcagagacattttaaaggtaccaaaaaccgtgtagaaattggatagattctagtgcgcctctttttaacgcaacagagtcaaacttgtggtgattgggtttcgcaaatcttaacgaactataaaccaaccacctttttcacgttttaggttaacatcaattaggcaacgatttgtacgagattcgcgaaagtgacacatttatgcattatttttttattttttaaacctgaatcaaaaactttccaattatctgtatttatttacacaccaatttagaaatataaggatcatctaaaatctcactttgtgatctttgatttacaattaaacttatacttattcctactttaaaacaaatcaaaaatagtatatttttatcaatcaaatttaatccccttagttacgaaagttcattcccagcagcaaatttctaccagcagcttgcgccataagtcagagtgcagtgatagcgaatggcgaaaaacacacacccacacaaacagcattagcactgatttgttgaacgtttggtgtgaattgcaagaaaaaattaccgaaaaacaaaacaaaaattaacaaacttcacccggctacgtagaaatagcgtgcggggatttgttcaatacaagtgctgtaaaataaagaagcggatttatcaaccagtatcgatcagttgttcgagattgaacgacgcgtcggtcgattaattcatagtgataataatgaaaaacaaaaacttatgtatcgaaaaataaaattgattgtcttgtagaccaaaat

SEQ ID NO: 350 - DNA, 2206 bp, Aedes aegypti
tgtaaatctgtcaggcgtcgtgcgcgtgcttgcgtgtgtttgtgaggtcccgaaaaaagcgaacgtcgaaagaagaaacgctgcgaaaatatcagaggcaaaaagaatcgtaagaaaaatacattttgaacactacttttttgctttgcggatggccgcccaatagtttcgagtgcaaatcgggtgtttttcgataggaattggtgaccgattccggggtggagtgaaggcagtgtaaatgaaggagacgccatcctccggtggaacaacgatgataagccaggtaacagtggaggcgcttcattcggccacctacgtggaaaactatttggactcagtggaaaacctgccggacgatgtccagcggcatctgtcccggatccgggagatcgatgtgctgtaccggaaccatctgagggacgtaagcgtttactacgaacagtggagcaatagcaccaacaatggaatggcaaatggtggagcagggggaagtggtggaggcggtgggggagggagtgattcgtcctcgacgacgccagccacggaaccggtcaataataatgccaccaaacgggccattgcgcggatccagcaggggctgattgccgcccaggagttgggcgacgagaagctgcagattgtgcaacagttgcaggacatgattgaccacaagacgcgccagctggatcaggacttcaagaacctggggagcgatttcttctcgaggttggattacaatcgagaggagaaggtgactgaaggccaacagaaagaaatacgttccaatagccccggaaatgcatgttcgccaaataacgtcaattcagcgccggcggtttacgcttcagcaaccggcaacggacagagtaccagtggagtcgggtcaaacggtggaaatggttcttcggcaaatgcaacaggaggaaactattcctctaacagtggcagtaataattccggaaacggaaatggatccggaagttccagcagtggtaatggaggcggaggtgcaggaggagctggagcaggaggcagtagtggaagtggagctgcggctgaacgtggatcgaaaagggcgcggcgaacgcgtactgaacagaacagtggcagtgcaaatggttcaagtacaccgaattccacatccggaatgccgatggacatagatcccatcgatacgagcaatatcaagcaggaggtgggaatcggtggaagtgggcaagcttccacaagtggtgccagcggaagtggaaccggaggcaaaaaccactccggacaggcgaacaacagcggccaaggcaagaagggtaatgcgggatcgggtaagaagaagaaacggaagactggtcgagggcaggcccgggaagcacgagaggacactcccccacccgaggaaaccatcgatccggatgagccgacgtattgcttgtgtgatcagatctccttcggcgagatgatcctgtgtgataacgatctgtgcccgatcgagtggttccacttcagctgcgtggcgctcatgtccaaaccgaagggcaagtggttctgtccgaactgccggggcgaccgaccgaacgtgatgaaaccgaaagcccaattcctgaaggagctcgaacgctacaacaaagagaaggaggagaaaacctaaggatattcgcggagagagctttggcggataattttacttttatgtaatttattgtattttttcctttttatcttttttgctacattcttataaggactaaaatagtcaatccaagaatctttattggatttatgtatagatcgattttctctggaaaaatgtcatgtaagttcaatccctttacattttgctaaacatttgagcagatcattaggaataaggaatgttccgatttattttttgtttattttttattagatgacttttcacctcggacgtatacataattaagatttcttcattataatgagaattttatttccaggggttgcagatatttcatttcatcatagaggcaacccccaagcggtttaattgtatgattgcccattcagttgataatcattgtagaaaatttcatttttcatttggaagaaataaatgaaaagaaacgaaacacatctgacagtacataagagggagaaatgaacaacaaaaaacttacacttatggaacatattgtattgcgaaattataagaaaaaataaaaccgatttgacttta

SEQ ID NO: 351 - DNA, 2470 bp, Aedes aegypti
ttttttcgctgaaattgtcaaaatagcacgcaaacagcagtcaaaaactggcgcacgaaaaaatatcaagtttttaatcaaatttgtttaacaaaagtagaatttcttcatctcttgacctttagtaacagtaattctccatcggtaagatattttctttgaccccgacaacgaaaccgcagccgttgtaaacaatcataggaaaagtatccagagatcacggaaaatgtcctcgtcggatgagaaagacgataccggcggcggggagcaatcgtccggcgagtcggaagtcaaaatcaaggatgaacccgatgacgatgagcacgatggaaccaccaactccatgatggacattgacggatcccctccgccagcgtttggccccgctgcactgggtctgcaccccgtggggacaaagttcccggagaaaacgaccccgacgcaaccgattcaggcgttgaatgctcgcggaatgcccgcccggatacgcaagaagaacaaactcttcttcgacgatgatctgctgatcaacgatcggatcccccctaagggaagccctcgtaagggtggaacgcctgggggaacggggtcagctaactcgtccccacagaaagggctcgtcacaccagggaagaatttgacccgttccgggcagaagaagaaggtcctttcgcggtacgtcaagatgaaggacagcttgaagaagcgcaaggaagatccggacgaagaagaagccacgggaacaactgcgcagggcacactgcgggttatcaatccggtcgccctgctggacaagaaagccagccagcggatcgggctgcgactgaggaatctgctgaaactgccgaaggcgcacaagttcgtcagctacgagtggttctacagcaatatcgatcgggcgctgttcgagggcgaaaacgacttccagatgtgcctgcgagagatgtatccggacctgaagacgcggcatttgacgagagccgagtggaatcgcattcgaaggaccatgggaaaaccgagacgttgctcggcggcatttttggaggaagaacgtcgcgagctggagcggaagcggcgtaagattcgtctgctacagaccaagcgatccggggatgtttcttttgtccgggatctacccaaggagattccccagcagctaaccgttggcacaaaggtgactgcgaggttgagagcccctcaggatggcttgttcaccggaaccgtggaggcaatcgatgtgatgtctagctcgtatcgagtgtgcttcgatcggccaggattgggctcccatacgatcccggacttcgaagtcgtggctaacgataatcccgagaagattgccctgaacacgatcaccaaggacttccggccgaaatatcagaatgcttcgttctacgttgcatcgcctgcggttaaaaatcctatcaccggcataaaaggagatccattgctcggaggagacagctatccgaagatccccggcatgccagacagcaaaatgctcttcccgaaggacaacattggcggatttccggtgaagctgctagagctcatcgttcgaacgagaaagacactgtcggccaagcagatgaaattgcttcggttgcagaacatgaactcggaggcggagatctacaagtcgtacggggatccattcccggaggaattccagaagcgctacgcctcgctcgtcgtagcaatggaaaagctcaaccgcgatatccatcagcagctgaaccaactgcaggtcagttgtaagaacctggcgcaggatccggccgtcgtggccatgatttcgccgagtcatctgcgagagcaatgccgcgatcaggcggaggaaacgttcgacaagaacaacaacggtcagttgacgaacgatgcgatgatcaagctgatcaaggatctcaccacgatcatgtacgtggcttccaatctgggcaagaacggggaccaaacggaacactgcctgcaggtgttgaagggctgcatggaggagaccaagggccggttagacttcgacaatatggtctcgtttcagcgaggggtggtacagcatatgaagcacattcaggcgggcttcgaggcagctcacaggcagaaggtggccgaagaacaacagcggcaacagttgctagaccagcggcaatccgaagtggaagcagcagcggcggcggctgcggaagcagaagcagattctcccgagaactgagcgtgaggcaggagggtgtgtgcatttctatatcttcttttgtattaacttttcaagtagttagttttagttcagagttttttcttcttcaagatgtccaatgaattacggtataagcaatttatttgggacgagcttgtacatgtggtttagataaatacaatctaatctggaaaaactggcgtaacgcagacgcaattatgcatgtttctacaagacttagtcatctttgcgtaaaatgggtttattctacgactggcg

SEQ ID NO: 352 - DNA, 899 bp, Aedes aegypti
gactagctatggataaacaagtattgacgaacatttcagtttctgcactgaaccattcatttttatgagaatttattgtaaataaattgagtcctccgcgtaagaaaacgatgacatcgcgtagtttttaggtgcaaaaaagcaattataatgttaagcaacgattgtggattgagaacgctaatttaatcgagtccgtatgtgtagtgaatgccgagataaaactccctttaaatggtgcatcatggatgatgaccttcaaccgctgaggagcgacgaatgccttgagcagaacaacaataacgacgacagcgagggagcagttggcggatctgtggaaaacgttgatccgcaaccagaatccgagcacgatgaaattgtatggagcgaggaagagttcgaccgtgatccacatagggcgtacttttatgatgcatatcgttcggaggcaggatccccggaattggacgattcgacggagaacgcgggagcgacgaccccggaacgaaaaccgctggccctgatggacgactgggatctctgggactacatggacgaggagacgttgaaacagcgactgaaatatcaccccgaactgttggaacaaatcacacggaagagaaagcggaaagccggacttgaggaaagcgacgatgacgatctctgtgcagtgatggagaggcatgctaaagtgacgaagtttaacgaacatacaaaagtgtactgaacgtggaatggtttagttttgatgttcatgggttatgttttacaaactatctatagcgaagtccaatttagcatgtgtaatattgatagaaatctttcaattttagctgtgtactataatctattattgtaaatatatttttttatcgattgcttcaaattctttcagcatt

SEQ ID NO: 353 - DNA, 2011 bp, Aedes aegypti
tcattatgcccctaatccccctaagtagatcatattgtataaaaaaaactcaaagcacactgaatctcagctgatatgtataaacatcttcaacgatgcaaattgctcgtctctgctgaagccatgtaaaagccgaacatcttcaattacctcccctacacgcataaatgatttatactttgtgtccacacatctatcgcgcataagacatcgatggcagcaggacgcccctggttggagtctcaaacattccactgcatacaagcgcaccgaagaatcacgttttcaaacgatacgcgccttccgaagcgtgtgctggtgagttcgccggtacacgctggagaggctctctcctatggcacacaccctaaagcctgcggccgcttgtataaatgatcgcgagcgggaagtggccagattaattggacttcactagtgcgcgttagtgtgccaccagagccagactacttcggacggacttttctgttttttttttgtaagatacagagaatcggctatagtgaagcacgttgtggtttatctaccgaagttatagttgagttgtgtaaactaggttcaattgagtgcaatcagtggattctaagatggctgcggtcacggaagtcggtggaatcaagctgggtaagctgttgatcgagggtaagaccaagcaggtatacgacgtgccttcgctgccgggtcactcgatcttgctgaacaaggatcgtattacggcgcacaatggcgttcgggcgcatgacctcgaaggaaaggcccagatctccaaccagaccaacgccaaggtgttcgggctgttgaaccaggtcggcctgaagacggctttcgttcggatggtttcggacaatgctttcttggcgcgcaagtgcgagatggtgccgattgaatgggtcaccagaagactggccaccggatcgtatctgaaaagaaaccccggcgtaaaggaaggattccgattctcgccaccgaagcaggaaactttctacaaggacgatgccaacgatgacccgcagtggagcgaagagcagattgtctccgccggtttcaaggtcaatggagtgttgatcggtcaagacgaggtggacatcatgcgccagacaaccattctggtgttcgaagtcctcgaacgtgcctgggccacccgtaactgcgccctgatcgacatgaagatcgagtttggagtggacgccgacggccaactgctggtggcggacgtcatcgattccgactcgtggcgtctgtggccatcgggcgacaagcgcctgatggttgacaaacaggtctaccgcaacctggcttcggttaccgcctccgatctggacaccgtcaagcgtaacttcctgtgggtcagcgagcagttggataacctgcagccgaagaacgaccatctcgtggtggtgctgatgggcagcccctcggacaaggatcactgcgagaagatcgccaagcattgccgcgagctgggattgaacgtggagttgcgggtgacctcggcgcacaagggaaccaagacgacactgcacatcgtgaacgagtacgagagcgtcctgagcaacctggtgttcatcacggtggccggtcgctccaacggccttggaccggtcctgtccggtaacaccaactatccggtgatcaactgcccaccggtgaagcccgagaacgtcagcttggatgtgtggtccagcttgaacctgccgtcgggactgggatgtgccacggtactgtacccggaagcggcagccttgaacgcggcgcagattctcgggctgaacaacttcctgatctggtccaagctgcgcgtcaagcagctggccaacttcaccagtctgatctacgccgacaagggcttccgcggggtcaggaaggagtagagttgtatgacagttgtgtaaggatgttattttgtaaggtttcgatttgattaagctataagacatttatatatttgttagcagatgaagagtacaataaaatctttttttataacaatttg

SEQ ID NO: 354 - DNA, 1977 bp, Aedes aegypti
atgtccaacaataaagaaacgcccgagcatctccaggctcagaacataatcgtcatccacccgggttccctttacctgcggatgggtcgcgcctcggatgtcaacccctgtcgcctattgcacgccattggccgccgtcgcaagccgggcggtcgggcctatcgggaccgggttctctcggttccgattgccaagcccaaggaatcgctttcggagttcgaggaatgtcggctgcaggtttcccacacgttgcaatcttgtgtccagtcggatggccggagacggtacgctactccgccgcagcagatctccgcgtttaatcggagatctggagcggaaactgttcaggcgtctcgagtggactggaaggacgatctgccgggcgataaggtctttggagaggaagttctgtggttgaatccggccggggagttcaatgttcactatcctattaggaggggcgagttgaacctgcacaaggatgtgggaggttcgatgtccggggttatgtgcgacctgcaggatatttgggagtacgtgctgaggcatcggttgaggatcgatttgaaacagctgaagcagtacaaggcggttctggtgatttcagacatttacaaccgagcacacttgaaggaactcacgtcgctgttgttgaacaagatcgggttcgggtgctgctttctggtgcaggatcacgtctcggccacgttcggagcaggactgggctatgcttgcgttgtggatgtgggtgaccagaagacttccatttcctgcgtggaggatggcatttcccacccgaacacgagggttcgattaccctatggaggggcggacataacgcagacattccattggatgcttcagaagtgcagcttcccctacaaggaatgtgaccaaagccgccctcaggatgcgttcctactgaaacaactcaaagaagacatttgccacgttaatctggacgtttgtggagcccaggagaagacctttgccgtccaccagccccaacaagaaaagcgtcgtttcactctgcaaatcggagacgaagccatcgtggccccgctagggctcttccacacggagctgttgtccgtcacgggggtcaacaaatccacccccatgacccagaaaccgtcccgagcgcagccccatccggaggattgttttgatgcggagtatctgcgggaaacaggccggcgagggaaggaaaatctggaacagaccgccaacgaaagcggaatggccaatgcggagaatgccgacgaggacatggtcgtggaggggctggagcaggacagggaaggcaaggtgaacgagaaggatttcatactgcccgggggacagatgatcggaattgaccaggccgtgctgcagagcatcgaacgatgtccaaacgacgaactgaagcgtaaaatgtacggctgcattctagtggtcggtggcggaatgaagttcaccggcatcagcaattggttgcagaaccgcgtggcgctgaagattccgctgatgtatcgttcggagcacaacattgtgaccagctcgaaggacatcgacgcggagattaccgcctggaagggagcggccatcatgtcctgtctggaaagtgccgccgaactgtggctaaccgaggcagaatggacccgctacggacttcggatactgcgggagaaagcagtgttcatgtggtagtcttcttcgacacgtggtttatcaatgtaagtaggtttgaactatggatttctatacataataagtaattaaaactcctagaacgtttttcgtggaagaacgacagcgagagtcgatggactcctatacataattcataattctaaattcaggacattattgctgttcatgaaaattgagcggatctgcaatctgtaaatcgattcctaatctcttgctccagtgaacgttgagctatttcgaactaaatcctatgagttctttaaaaaaacgataaaggtactgtct

SEQ ID NO: 355 - DNA, 2833 bp, Aedes aegypti
attttgtgacggaaggtcgcattttacccgtacgtctgtgaagtttgaaggtcgattgagttattaatttgtaaagtgagtgaaagcaagtgattgaaaacagcgctgcgaggctggttctttgcgaaaccgaagaagtttaaaacctattagttattgttggagaatttttcgaggcgaactgggcgacacaaagaaaaccgaaaggatagggctcgactacgtttggaatacgttagaccctaaggcgataattttaccgagttggggggccaaaactctcaactcattgattggtgaagcttaagcttttaaaatttctataaaactcaacggagaacttatttctctatcgaaatggcacaggcaactggactcgaaagcgaatcccgctcctggcgagaatccctgccctgcaacaacgttgaccgaccagtttcagcagtaccagtaccaactaccaagcctcgacctagaagagcaatccctgtggctggaggacccgaacagcttctgcaactccagctggatcagtccgatctggaatcagccgccactgacgccgccagccagtactttgacaccccccacgaccagtggtgcgttcggaagggttgggtctacaccgacgcagacggtcgagaacatgtcgccgtctcctccaacgcccctcccgtggtcatcctgcagtatgttcatggtcgctacggaccactggacgaatggccccagcaacccaatcgatacaacaggtgaacagcaactcaacacaccggagccggtagatatccgtggatttgaatacgaaggaagtgtgggaggacttgatccagccgacaatcctagaaacgctattagtaagaatcacatcacaaacagcagcatcaccacgatgaacggagaagaacgcagcaactacagtgtcggcaggcacggtaacaagggggaacaaccattcgaattcaagcttattccggcaacgtcgccgacgtccccttggggcacaacagacttcaacacttcctggcagttcgagcgctgccccgaagaaacagtccttagccccgagatgagctacctttcgccacaccagagtccctctggtgtggcatccccggacaccaattcgggggtcagctcagaagcagacgaattcgaaacttgtgtcgatttcaacaagatccaaccgaacattgaggtgttcagagtcagcgaagccaacgaatacagcacttcgctaaccgacgaaatcgaacaactttcggagtcattctactgcaaagcagaggacctcatctccatacaaaaccccaccctcgacggaaccgttgccgtaccgcccttcttcctgaaagtccttcaggaagaagagtcgaatacttctgacggcaccccactatccccgtccgtgtcgaatggtaacgtgtatgacacacgtcccccaattgttaccaaattcctaagtgatgctgacaagaatgatggagattttgaacaagagatggcagaagacgacgtagcagaagctactgcaataacaccggcaacactgcaaagcgtctccaacgacgctctagatttgaaaacacaaacccagctagaacataactatacgattaagctaccccttcttgaagccggcaaccccggttaccttgtaacaacaaataataccctggtgaaggaacattctttgaaaccaagagacaccactgtaatcctaccgccagtgcagcaaccgcctaagcgtacacaaccgtcggccatcaaacggcagctcttccaaacaaagatgaaatccgaaatggccaccggtaacaaactgaagctcaaaatgccaaccaccagcgcaccactcgtcgctccggtaggcatcctgaacactccagaccttaccaaccaagtcctcgaactagaagccgaagcggaaatcctcagcgccgaagaccaattcgatcttatcacgtacctctcttccggaacggactacgatgtcgtgccactctccccggtcgaggagaagcccaccgtacccaaagaggaaccggtccagcctgagtcgaccatctgccccgaagccctcagccagctgctggccaacccggccaaacggaagctcccgatgatcaccttggacaacctggaagagctgacggggcccctgacgccgaagaaattccgcagtgcgacctcgtctacagcgtcgtccgtctgcggagattccgtctcggaggtgtcgtcctccaacaagaagcgccgcggacgccccccgaagcagtccagcctggtgtccgatcggaccgagtatcagcacctgagcgaggaagaccagcgctaccgtgaacagcgggacaagaacaacgaagcgtcacgcaagtcgcgcatcaaccgacgggatcgggaactgaagctggagcacgaggcgaacgccctgaaccagcagtaccaggagctggaaaacgaagagcgcacactgatacgggactgtgcccgatggcgccgagcggtcatgcgattggcactgctgtaaacgcaggaaacggtgtctctcttggttagatttgtcaaactagtatgaagtacaattttatttcctagcctgtgtagcaggaatgttataatttgataaattaacgtagtttaacatgaaatcaaaaactaaaaaaaagtttaaaaaatacaaaacgagaaaaaataatcaagccattggttccagctgatataaagcaacaaaggaaacataaaaccttgcatggataataaatgtatgattccgttgatgtatttgtactctttactttaatcatcaataaaacaaaacttcaaatcaaaa

SEQ ID NO: 356 - DNA, 4104 bp, Aedes aegypti
aatttttttcttgtctacccgcggcgtagtaaagccaagctcttcgctcgactccgagtcattgttcgccatcttttcacgcagttaacatcgtcggagtgctgctctctgccggatcaacttgtgaagaaaaatcttaattcctaaatccaaaaaattctcttaaattagagaatttacagtgctagaatcagttgtattattcgattagtggagttttaactacttttaaactatcaaaatgtctgaaaccgagaagaaagcagaacaatctaccggaggagaaaccgagaccgacggcccaaagcctgatgctgagcatcaacgcaagatcaatgtcgctaacttgccgtgggacgtaactgagcagcagttgcgcgatttgttcagcggtcatgaggtcgagaaggtggagatctaccattaccgcaagtacacgctggccttggtcctgttcaaggacaaggacaccgctgccgcggctctagccgaaaaggagaactctatgttccgcgatcgccgtcttcgtatgcacatggaattcacctcaatccgccatatcaagcgtgaagtcattgttaccgtcgttgaagatgagaacatgaccgaagagcagctgtgggataaggttaaggcagctggcgtggaaccgacttcggtgttgatcttctatccattgggctatgttactttggagaaggaatgcgacaaggctcctattcttgagaaactgaaggccgctggattcaatgcgcatgacttgaaccaacgtgaccagaaccagcatttggacatctggcgtgcggccaaactgttcttccgtaaccgcaaccgcgtccagctgttgaacattcccaacaagtggattgaagataaggaagagatgaagaaacaatgcgctgaaggaggtaccattaccgaagctgtttcgaacaatgttacccaaaatccccagatggcttccaactatgcccgaatcttctacgaaactgaagagcaggccgtcaaggctgcaaaggctctgaatggacgcgttgttgatggcaagcgtatccatgctctgcatctgggatccgcattgatgcccaactacaagacctcggtctacgttacgtctttggacaagggtgttactgaagagcaagtttatgatcatttcaagcagtttggcgaaattgagttcaccaaccgtcgcaactgtggagatgctgctatcatctgctacaagaacgctgcttccgctgagaaagcgcttgcatgcaccaccttcccggcgcctaccgaagagaacaaggatgctaccaaggaggttgttgtcaagaaatacgacggaccattggtccttcgtccggttgccctgaagcgtaaattgaaggccggagaagaagagaaggatcaggccgaaaagaccaaggagcaacaaagtgtgctcggaaagctgaaggcttaccacccgatctttgtcggcaacgtgccactgaattgcccacctttggaattgaagcactactttgcgcagcacggaccaatcaagttcatgttctcgccgcaaatcttggcttaccgcaacagcgcgcctcaccccgtgaagacgttcatcatctactacatgaaccgtccgagccagcagaatgccgttcgcttcttcgaccacaagttcttcggcggtcaccgtctgcatgtgctgccactgcgcggaacacaaaacatggatgtcaagaagaccatcaagatgaccaagattccattcatgtccgaggatgcgttgttcaagaagatcaagccattcgttggcaagatcaaccgcatcgtgaagaagtcgcgattgatagcttacattgagctggaagacagcgccgacgtcgagaaaatgatgaacgttgaaacccctgaccatcctctgccaaagggtaagatggaacagctcaagaccccaatcagcgctcgtctgtacaatgaggacgatgttcgtgtattgaacggcatcgccaagattgtcgccaagaacccggatatgctgaagaagaacattcagccacccaacaagcgtccacgcatggagttcggtggtccaggttttaatcaaggccctggaggcttcgttcccaataacaatatgaacaatccaaatgctatccaagatttgttgcgtcttgcgttcatgtccggcaagaacgttggcgagagtctggcttctaaccagagctcgttcggacccgacccaccagtcgccaattccaacaactttggtgacggtggtttcggtaaccgtaaccgcaataaccaaggtggtaatcaaggcaacttccgtggtcaaggaagaatgaacatgaaccagaatcagaaccgtggcaacaatgccaacaatttcggtggcaacacaaatgccggtggtaacaacttccaagcttcccccggaaatcaaaaccgtggtggacaaaacatgaatcgtggtaatcaacagaaccagaaccgtgctggtggtaacatgaaccaaggcaacaacatgaatcaggccggcggcggaaatgttaatcgccctcagcaaaataagccaatgaacatgaataccggtaaccaaaatcaaaatagaaacaaccaggttggtggcggcggcaatatgaaccgcaaccaaaaccaaaataaccgcaacaacttcgacaatgacaattcctttggcggaggaaacaactttggcaacaaccgcaacaacaatttttccaatgacagttttggtagcaacgataataactttggtggtaacaatagtggtagtaacaacttctcgaatgacaacaacttcggtggtaataaccgtggtaacaacttcggtggtaacaagcgcaaccagaacgataactttaataactcgttcggtagcggaaacaacagcggtggaaacaatcgcttcaataacgatggaaacaatttcaatagcaattttaacaaccgcaaccaaaacaatcgttttgacaacgacaacgataacaattttactggtaataagggtggtaacaatttcggcaaccgtcaaaacaagcccttcaatcagggaaacaatcagggtggcaaccagggaggcggtatgtcctttggtgaatttaacaactccaattcctccaaccgtagtggtggaaacttcggtggaaacaattccggtttcaattctggcaacgccggaggaaacaagtggaacaacaattcccagcaatccaatactggcagccgcctcgctggtagcatttttagccgacgcttctaaacagctaaaaccaagaaaagttaatttttacaagcaatttgtgtcttgtatataaaatcattagcttcccttaatcccaccgttaacagggatgacggaaatctgtctgggaagcgtactctttctaggtttaggcagaacaaactaatgtaacttaattttaagtaaaccacaaacttcttaaaccagaaataaacttataacagtgagacgaatgaaaataaccattttgccgttctttttacaacatttgactacttgattaatgaaaagacacaaattataatctcacatccagcaaaatatccaattcttgaaatgaaaaattcaatgttcaataaaagaaaaaggtagatctatagcagtaccattaaaataaagtttgccaggcctgatggaaccctgacatccacagaagtatttattattttattttaacattaaacaaaaagcttaggaaccatcgtaagctgcgaagtattgttctattcgttattggaaaggaaaaagtttgatagcagcattcaacatgaaagaacaagtttaaatttcattcaagaaataaacatttgaaaacgatgtaactccacactcacacaaagtagcgcagtgttaattgttgtattggcagcagttatgcaacaactgaaaaagtactcagaaacgctgacgaacacatcttactgcggttaggcatcctatccccccatatattcacttagatgaataatgctaatatgtagatctcctcgcgtttctgtgcgatggacatgtaactgtaagaatatgattttagtgtaaaactgaaataaaatgtgcaacactgaagtaaaatgaatttt

SEQ ID NO: 357 - DNA, 997 bp, Aedes aegypti
atgccgattgggaatctgatatcaatgatcctgtacgccgtcgtgggcctaattggactatttggaaacacacttgttatctacgtggtgctgcgcttctccaagatgcaaacggttaccaacatgtacatcctaaatctggccattgcggaccagtgtttcctaattggaataccgtttctcatcatcacgatgcatctgggcgaatggaccttcggcaatactatgtgcaaagcgtacatggtgtctacctcgattacacagttcacctcatcgatattcctcttcatcatgtctgcagaccgttacatagctgtgtgccatcccatctcatcgccacggtttcgaacgcctctggtatcgaagatagtttctttttttgcatggacaacctctgctctgataatgctaccggtgatgctatacgccaacacggttcatcgagacaagggcaaaatatcctgcaacattgtttggccatcggaaaatgctagcaactccggcacaaccttcaccctgtactccctcatactgggctttgctgttcccctttcgcttatactaatgttttactatctggtgatccgcaaactgcgcacagtgggtcccaagagcaagtccaaggaaaagaagcgctcccaccgcaaggttaccaaactagtgctcacagtcatcacggtatacgttctctgctggctgccctattggatctcccaggtggcattaattaattccccaccggatatttgcaaatcccgtctggagattaccgtttttgtcctagtgagctgccttggctattccaattcggccatgaacccaatcttgtacgcttttctatcggataatttcaagaaaagctttctcaaagcgtgcacttgcaccaagggcaaggatatcaacgcccagttacaaatcgagaacagcttcttccctcgcttcgcacgcaacaggggctcggaaaggggcaattcaacgaaaatcctccatcccggac

SEQ ID NO: 358 - DNA, 1382 bp, Aedes aegypti
atgtccctaaacgaaggcgaggtgaagctttcgcaccgcaccaggaaacgcgtccgggaagtcaagcgaaaggctcgtccagaactggccgacaagagcgcctgggtgcagctggagtaccacaggaagttcgacaagttccgggagttcgaggacaatgtggagcggatccacgtaaaggacgtttcgccgcgggagttcatcgagcggttcgagtcgatctacaagccggtggtgatcgagggcattaccgagggctggaaggcggagtacaagtggacgttggagcggctggccaagaagtaccggaatcagaagttcaagtgcggcgaggacaatgacgggtatagcgtcaagatgaagatgaagtactacattgagtacatgaggaacacgacggacgatagcccgctgtatatctttgatagcagcttcggagagcaccatcgccggaaaaagctcctggaggattacgacataccgttgtacttccgagatgatctgtttaaacatgccggagaggaacgtcgaccgccctatcggtggtttgtgatgggaccggcccgttccgggacgggcatccacatcgatccgctggggaccagtgcgtggaatgcgctggtcagcggtcacaaacggtggtgcctgttccccacgcataccccgaaggaacttctgaaggttaccggagcgatcggaggcaaacagcgggacgaggccattacgtggttcaatctgatctatccgaagacgaagcagctggactggccaagcgattgtaaaccgttggagatcctccagaaaccgggcgaaacggtattcgttcccggaggatggtggcacgtcgtgctgaatatggacgacacgatagccgtgacccagaacttctgcagcaaaaccaacttccccgtggtgtggcacaaaaccgtccgggggagaccgaaactgtccaagaagtggctgaaggttctgcaggaagtggagccggagctggccaaagtggcggccgagatcgatgtcggccagagcaccggtgtggcgtcggatagctcgagcaactccagctcctcgtcttccagctcgagcagcgacgaaagcgacagcagcaacaccgacagtggccaggaatcgctgtctgcccacaagaccaagaagcgccggaaaaccggtggcggaatgatggcctgattaatactgtgaagttgggacgtgaagttgaattgcgactttctttttaaatgaaatgccttgtttctctgactgcggggaaaaaccacgaccctgagtattaccctgaaactgaagcaaaagaaatttgttaggtttacaaactaatttatattgaaaataataaactagaacaatgtgaattgataacaagc

SEQ ID NO: 359 - DNA, 2924 bp, Aedes aegypti
ccactcaacgtttgtcgtgatcggtcgtgcgtgttggttgctccgcttgtgaaaaaacagcagtgagaaaaaagagtcattgtgaaattgcagcaaggaaaagcaacggaagccgattgccagtggaaaaaatcatgtctgatacggtggaaaagaggaagctctcggagctgcgtgtagtggacttgaagcaggaactggaaaaacgcggcaaggacggaaacggagtgaaaaatgtgctgctcgagcgattgactcaggcgttgaaagacgaaaagttggatccggaaacgcacgagttcgaagtcgtcgccacgggaaaaactccggccaaaaagggaaagcctaccaaggcagaagaagagaccgcagaagcagatggtgccgctacctcggaaggcgacttgaacatggacgatatggtgattcaggatgagtgcaatgaagacgaaccggccgcagtcgaagaggccaagaagccggaggaggccaaaaaggaggaaaagaaggaagaaccaaagaaagtggaaaaggtagaggttgcaaatggtgaagcagccaaggctactgaaactgataagagcagcagcaaggaggaaaccaaggacgcggacaatgaagattcgctcaatttgacgattggcgaagaagacgagaagctgcttcacgacgacagtagtaacatcgagagcgagaagaaaggtgctgaatccggaaagagctcggatgccaaaaaagtcgatgcctcggaggaaagcaagaaggctgagaagaccgactcttccagcgagaaaacggcgggcaccgcaaaggacgagaaagagagcgctggaaagtcctcgtcaacgtcagccaagtcgggctcatccagcgactccaagacaaagtcgtcacccagttcgagtgacaagacggctaccgtgtcccggaacctgtgggtttccggtctatcgtcgctcactcgggcaacggatttgaagctgatcttctccaagtacggcaaagtgattggcgcaaaggtggtgaccaatactcgtacaccgggaactcgttgctatggctatgtgacgatggcatcggccaaggacgcaacggagtgcatcacccatttgcaccgaaccgaattgcacggacgaatgatttcagtggagagagcaaaatctgatctaggtccagcgaagcctacaaccgcaaacagcaccagcactgataaaaagacggaatcggccaagacgaccggagcggaaggtggtggggatagtggcaaagataaagacaacaaagacaagaccgagaagaaggatgataacgataaccgatcccgtaacagcaaagaacgtgccaggtcggtcaacaggagtcggtcccagcaccgcagccgttctcaataccgaggcagatccgcggaaaaagatgccaagccgaaggacgacaagaagaaagatgacacccaaaagggagctgaagtcaaagagggtgcagcagctgtggcgcgcaaggacggagatcgtcgcgacaatcggaacaacgatcgcagagataaccgcaaccgggatcgtgaggtcctatcgctacagaagattcgcgaagagcgcgagcgccagcggctacgcgagaaggaacgtcaactacgggaagaggaacgacgccgccgggagatgcgccagcgccaacgggaggaggaacaactgctgcgacgtgagcgggagaagctggccatcgaacgggctcgtattgagaaggaaaaggccgaactgttgcgcatcgaacgcgaacgccagaagctggagcgggagaagatcgaactggaacgtctggagctgaagcgtcagcaaaggaaaattgaagaggcgaaacggaacttgaaacgcccggccacaacggatcactacgacgatgaccgaaaacgtgcagccggatcggaccgtcgtttcgaagcacctccaccaccgtcgatctcctccgcaggtcgcggttcctacggatcgtcggacaagaaacgtatagatgactacaagtcacgtgacgattacaagtcgcgcccggttgatgattaccggcgaggagacacctataagcgcaacggaggtggagttatggatcgcgatatggatcggccatcgatgacaaccatggatagccgttaccctgacagtcgctccggtggcggcggcggtggtgactaccgtggaagtggcaatccccgggatgatcgcgatcgcaacggatcggcacccaagtctcggtatatggatccaattgaccaacgctatcaggatcggtctagcagcagcggcggcggcggtggcaacagtggtccttggaatgcagggccaccacagatgaccctgatcccagccgggatgagcagcagcgaatggcggatggataacaaccaggatcggtacgatcgaacctacaacgagcgcaaagctccacagatgagtgccagccccttcatggatccctcgaggcagaatcagttcatgggaggtagtggcagcggaggacgtccacaggaccgttatggagctcccgtttccaatcggttcgacaatggacggtactaggacgggataagtagcgatacaccgctctttggtgtatattggaattcctagcattacatattcaagtatgaatgacatcgttgaagcacagttcaagataggcttatgtaaaagatacacataaagcattggttagtggagttgcactaatctcagctacatatataggcatagctgtaacgagacaaatcccgatgtgtaccttccttgattccttatccgtgcatcccatttttcctactgacctagatgtgtgatcattcggtgtaagaatcatctctgtagtagtcattattgagtattagctcgtaagtaatttaaacaggattcaataaaggaaaccgatagaagaaa

SEQ ID NO: 360 - DNA, 2726 bp, Aedes aegypti
gtactgttacattacgttatattgtttttttttattattgtatttttatccgggtaccttctcaggggcctgattacaaattcccccttgcaaaaaaaccctacatcgggttttagccaattggcatattttcatccacgtgatttggccctgatcgcaaattttcccggaagtttcacttacaaaatagaaaaacaaaatctggctgcactgctccttacagttttgctcgttttttatgtcaaaagtaaagcaaaacaaaagaaagcaaaaaggaaacgtaacgaaaatattttgattacgaagtcttttgtgttgtctgcgacttggtgtgaaaaacactcccattttgattttttattgtgcaggaaaaaaagtagccccagtatgacgatattcagtgtaaacattcgcctgttttaacatccaactcgaagaaacgaccagtgaatcagaagttggacatagggtgcgaaaatttgctgaagttgcagtccgaagggattcgacgaattttcgaacgagcaggaagcagctggagtaataaagtggcgtgagtaatttcgcctttgccaaggaaggtgtcgtcagccatcgacttcccagagagaggaaacacggagaattacgcatcgaaacaatggacaacgaaaacgcaatcgaggaaatcttcattcagcatggagtcacgctgaagaaggcgagcgcaagttacatttcggcactggacacgattggagtgctgctctttggaaaatataaaaaggagaatctacattacttcgagtggaagatgtcggaaccgtacgaaattatggacaccgacagtcaggacagcgattggtctttggtgcacacggggaaatcctcggacgacagcgccaactccgaaggtgattctcagaagagctcccggatcaccatacgggtccttttccgggatcttaagggcatcgaatcccacaataccgaactccggttgtatgttcaggatggcgcgaggaaaagcctttccgttcatagtctctatctgttcaatcatggctccccgcgctcgtttgtggatttcctggagcggaagcatttcgtgagcagaagcaaacaccggaagcatttctttcactgcatggaggaaaccaatagtgacaaactgcagaagtcgttctcggagctgaacatcgaggacatcataagccaaccggcggcaggcaattattatagcaaaatctttgccaacgtgcatcacacgatcctgtcaacggctaggcaacaggtcagaccgcgcttgtctcattcgcgagagaatcaggatccggaagaggatggggaagcgagtagcaacggaagtgagaaccgtgtcaagagcgagaacgtcagcaaagatgagcgtcgaaaattggcgccaagaccggaggtgcatcggggagaaccgctggacgccaagaaatgggcagaattccacgctgccaatggagccattaccgatccgaaccgagttcgggatatcatcttcagagggggcatttccgacgacatccgcgccgaagtgtggaaatacctgctcggtttggatctttgggagcacaccgccgccgaacgggaggcaaggcgatcgagcaaaacccaggaatacttcctcatgaaactccagtggcaaacgatcactccgatccaggagggcaacttcacgggctatcgggagcgaaagtgccaaatcgagaaggacgtaaaacgaaccgacaggacgtacgaattcttcgccggggataacaatccgaatctagttaaactgcaggacattctgatgacctacgtgatgtacaattttgacctgggttacgtccaggggatgagcgatctcctggcgccgatcttgtgcctggtccataaacaagcggaaagcttctggtgcttcgtcggcttcatgcagaaggtcttcaacaacttcgacatcgaccagaagggaatgaagcaacagttggagaatctccgaactttgctggccttcgtcaacgagaagctctacaaatacctaacggacaaccagtcggagaacatgtacttctgcttccggtggcttctggtctggttcaagcgggaattctgcaatgcggacatcatgctgctgtgggaagtgctctggacaggcttgccctgtccgaatttccacctcttcgtctgcgtggccattctcgatcaggagatggacgttttcattgatggcaacttcacgttcaccgacatcctcaaacatgtcaacgaactgtccggcaatctgaacgtgacggccatcctcgagcaggcggaaagcatctacctgcaggtgaagaacacgatcgagacggccaaggagccgcacgtcgagctgcgcaaaatcatcggggaggaagtgagcccggcgggaaccagcggaaccagcggcagcgaggaagatgacgacagctgcatgtccattgtgaacgaaaaatccttggacgatcaggaaatggccatccagcgcaagattgacgaggcgtgtgatttgtcgatgagctttgcgttattttaggagggtaagtctgttaataggttcttatttttcggggatttttctaaaaatacgaaataaattgaccatttggaagggatgtataaatattgtttataaaatattatcgcttgaggtacatttgaaatcatgtataatttgtggaataaaaataacgattttgttgtatataaagtaa

SEQ ID NO: 361 - DNA, 2782 bp, Aedes aegypti
actttgacgtcacctgctgcaatcatcatcattcatcaaaatcgtcattcgcagtcgggttcggtcgcactgaacataaacaaaagagcgtgtgttgtgttttcccatcattgttttccgttgttttcctttgtttcgtcgtgattttcccccaaatttttcaatcgatgtgcgctccgtccgagtggtgtgaaaatttcagtgaaaatgttcagtgcttgacggtttctagtaaatacaacagataggaatctaagacggggaacccgtcagaacagaaacgatgccacgatcaaaatgttatgcgtcatcaatgtcgcttcggcggtgtcttccggtaatctgtttggtgattgtggcccgtttggtggaagcccagaaagggatcttcttcgggtgctaccagcgagatcgatccgggcagctggagctgctgaccgacagtttggacaaatgcgttggccactgcgagcttggcttcttcaggtacgcggcactatcggatacgcagtgcttctgcttcaacatgattcgtctgcgccagatagaggacaaaaattgcaatcttagctgtcgccaaagtgcggagcattcttgtggcggtgataatgcgcaaagtttctacgaaaccggggtggatgtggccggacccgttaagaatctcaaactggcagaaaaggaaacggaaagcacgatcaaaatttcttgggatgctccgtccttggatggagtgccggtggacgagtatgagatcaatgccgtcgcactgtccacctttgccaactatcgactgtatccgatgagctggagtgtccacaataactcgcagtcattcgaactggccagtttggttccgggtacgcgttacaacataaccgtgacgagtgtttcggaaaagggcgccggagggatggcttggatggtggcccagacggaaattggcgttccggatccggaaccggaagaaccggtgatattgcgacggctggattcgaccgttcagatccagattcagaaggccattaacaacaacggcccggttaactattaccgagtggtggtgcactacgtggacgatgatctggtgcaaacgttcgacgagaccctgctggatacgtaccaacggtcacgggagaagggcgttccgtactacattgctgccgaggtggagatgaaggaggactcactgctgttcaccgttggcgacaagcgacactatcgaaactacttcaatccggaaattcctgcccggaagcacgtgcacatctccatcggaatcgtcagcatcttgaacaacgtggtaaaggtgcggtacgctaccacgacccacgagcagcaccagcacccggatcaccaccacgtgaattctaccaatgctccggagcggaacgaagcgctgatcacggtactggccgtggcttgcgtcctcttcggaatcgtactgttggccagtatcgtcctgtacgtttacctgcgctataaaacatcgagaaatactcgtccccttcgggatcaccacgaaatggccctgcagggaccgatcttggaagtggagaacaacggcttcattccggacatttacgaacagcgcggattcgaggcggaactgcacgacatcattgaatctctagcaccgcaccagaagcatcctcggaagcatctgtcgctggagatcaataccatcctgggttcgggcaagtacggggacatactcaaaggaagcctccagcgcgagggcatcgaactgccggcccaggtgcacgtcatatccgacgacatggacaagatcgatcagattggcttcctgaacgagttccggcgggtcatcaagctggaacagcacccgaacgttctgcagctctacggggtgtgcgtcacgccggactggtgctacgtgctgttcgaggagatgcagaccaccctcaagcagacgctgctcaacgcgaggataccaaataacgtgaacagtccaaagttttccaccatctcggaggaaattgtcgtgaacattctgtgtctggtgtgcgacggcatgcagtacctggttgagaacaatatcgtcaacaagaagctctgcgcccgaaccgtctacgtcaacaccaagttcgaggtgaaggtaagtgccttcgggccgccactctacggggacgacaacggccagcaggtggacatcatccgttggaacgccccggaggtgatcaagttccaaaaccacactgccaagagtgacgtctggtcgttcgggttgctcatctgggagtgttgctgtttgggcgcgaccccattcgggacaatcaccaccgataatctgtttgccagcatccgggcgggcagtaggcccgaaaaacccagcttcgtctacgacgacctctaccagatgtgccttaactgttgggatccggacgcggcagaccgacccgagttcgacgacgtgagccgatacctgagacaaacgctgcccatgctgcgctacatgctgtcctttgaacggacccaaaacgcgcagatacctccgtacttaccggacctggagctgattccgtgatgaggtggattccgatccaacaaaaccaagatcaaattgtaaccttaggacaatattttaggaacgttaagtattctattctctgaattccgtccattttatcaaatcaaaagatattttttaagactatggaagatattttttatctagctaatagtgcctaacagtataaacgtaaattgttgtattagtttttttttacacagaaatatattgaacctttgaaatggagtaaaa

SEQ ID NO: 362 - DNA, 1114 bp, Aedes aegypti
tcacagttccggagctgtccaccatcaataagttgaagattttctgtactagaagcagaatgaagggcaatttgttcatttcgtttcttttggcggtgaccatcagccactgcaaagtttcgacagcacctgtaggcaaatgccccgatatcttcgactccaaccacttggtcttcctgccccacgaggactgcacaaagttctatttgtgcggtcataatggcccggttgagaaacagtgtccatcgggactgcactggaactcgcaagccagcgtttgtgattggccagagttggccggatgtagtggtggaagtactgtgcctccaactgtcacagtaactccggaacctgtaacctctactacggcatctcctgcagtcaccacaacggcaccagctgcgaccactagtgctcctccctcttcaactgtggcaccaaccaacaagtgtcctgaattcttcaaccccgatcacgttactttcatgccccatgccgattgttcaaagttctacgtatgcacccaggaaggtcccgttgaaaagagctgtccatctggacttcactggaatcaacagggtagcatctgcgattggccggaggtagctggatgtgtggccagtgcatcgatcccacctaaggaccgtgaaaccgttggtcagtgtcccgaactgtacgatcccgagaatgaagttttcctagctgatgcgtcggactgctccaaatattacctatgcacatggggaggcatcccggtactgctgaactgtccagctggactccactggaataagaacaccaatcaatgtgattggcctgcccaagccggatgtgcgcagtttgatcgagatctagtcttcaaacactcgaaaccaattgaaatttagtcttcgaaagtatctagagtggtttccgattgcttaagtactgtgatacagtggttccgatgacgatgacacattcaattgagagatgttatcagtgtgttgaataaaaattattatccagcaggaaggttaaactctgtcaagtgtttatacgtatttgtccatcatatctgttaccaacaataataattgaaatacaggtgggattcgctcgttgggggcctgat

SEQ ID NO: 363 - DNA, 2088 bp, Aedes aegypti
atggtaaactttgctgaattcagtgacgaacatttggtacgctgcactatcggatacgcagtgtttctgcttcaacacgattcgtctgcgccagatagaggacaaaaattgcaatctcagctgtcgccaagtgcggagcattcttgtggcggtgataatgcgcaaagtttctacgaaaccggggtggatgtggccggaccggttaagaatctcaaactggcagaaaaggaaacggaaagcacgatcaaaatttcttgggatgctccgtccttggatggagtgccggtggacgagtacgagatcaatgccgtcgcactgtccacctttgccaactatcgactgtatccgatgagctggagtgttcacaataactcgcagtcctttgaactggccagtttggttccggggacgcgttacaacataaccgtgacgagtgtttcggaaaagggcgccggagggatggcttggatggtggcccaaacggagattggcgtcccggacccggaaccggaagaaccggttatattgcgacggctggattcgaccgttcagatccagattcagaaggccattaacaacaacggcccggttaactattaccgagtggtggtgcactacgtggacgatgatctggtgcaaacgtttgacgagaacctgctggatacgtatcaacggtcgcgggagaagggcgttccgtactacattgctgccgaggtggagatgaaggaggactcactgctgttcaccgtgggcgacaagcgacactatcgaaactacttcaatctggaaattcctgcccggaagcacgtgcacatctccatcggaatcgtcagcatcttgaacaacgtggtaaaggtgcggtacgctaccacgacccacgagcagcaccagcacccggatcaccaccacgtgaattctaccaatgctccggagcggaacgaagcgctgatcacggtactggccgtggcttgcgtcctcttcggaatcgtactgttggccagtatcgtcctgtacgtttacctgcgctataaaacaccgagaaatactcgtccccttcgggatcaccacgaaatggccctgcagggaccgatcttggaagtggagaacaacggctttattccggacatttacgaacagcgcggattcgaggcggagctgcacgacatcattgaatctctagcaccgcaccagaagcaccctcggaagcatctgtcgctggagatcaacaccatcctgggttcgggcaagtacggggacatactcaaaggaagtctccaacgcgaaggcatcgaactcccggcccaggtgcacgtcatatccgacgacatggacaagatcgatcagattggcttcctgaacgagttccggcgggtcatcaagctggaacagcacccgaacgttctgcagctctacggggtgtgcgtcacgccggactggtgctacgtgctgttcgaggagatgcagaccaccctcaagcagacgctgctcaacgcgaggataccaaataacgtgaacagtccaaagtttccaccatctcggaggaattgtcgtgacattctgtgctgtgtgcgacggcatgcagtacctggtgagaacaatatcgtcaacaagaagctctgcgcccgaaccgtctacgtcaacaccaagttcgaggtgaaggtaagtgccttcgggccgccactctacggggacgacaacggccagcaggtggacatcatccgttggaacgccccggaggtgatcaagttccagaaccacactgccaagagtgacgtctggtcgttcgggttgctcatctgggagtgttgctgtttgggcgcgaccccattcgggacgatcaccaccgataacctgtttgccagcatccgggcaggcagtaggcccgaaaagcccagcttcgtctacgacgacctctaccagatgtgccttaactgttgggatccggacgcggcagaccgacccgagttcgacgacgtgagccgatacctgagacaaacgctgcccatgctgcgctacatgctgtcctttgagcggacccaaaacgcgcagatacctccgtacttaccggacctggagctgattccgtga

SEQ ID NO: 364 - DNA, 3264 bp, Aedes aegypti
gtcaaaaaagaccacttcttaacgattttactgagaatgtgttaatattttcacatttgcccttattcatgctctgcatgagttctgttgttcttaattttggcacccggctcttttgagatgtaacgcgaacatcacgatatcgcccacctctgttttgccgctcttttgacatcacttgggttgccagcgcgcaccttttgatccctttatctgtcatcctctcggtctcgggcgcacgaagcttcgccgcatcggaaaatttcccctttggctttggcaaaaattgaaaaccttttcgcgtcgtctggctcgtcatcagcttttcggagagcgtttcctttttttcggttttttgagtgctctacagtgttaaattccgaataattttatcgccatttcggtgtttgtgcgtcgggtaatgcgatcacggtaaaatcggcgccggtggaattctacgaaaccgaaaaacgctcttgcaaagtggaagtgactggctgatctgggcagacagtataagaagaataaaaagtgtgtcccgtttttctcggaccccacaaaacactttgtcaccgaaaattattcacataaccggagtgtggcgagtttggccgattcgttgccggaactttcttggccgttttttctagtagttgtggcaagtctatctatctatatgagtgcatccgtctggccaatcttccggacgtatttcatcttcccctgaatcctgctgaaggcgttccggcatgtctgtgacatcgctgctgtcccgcatcaaagagttcgtggtcgaaggtcgaaagcgaaaaagcgaggaaccgtcagaagcatcaacaattacttttgccaaatatcgtcgaatcacggacgatttccccaaattcatctcgacgccgttgagtaatgattttcattccaagtcagaaccgatctcggacagattgaggatcccggtttactccaagaaaatcatgtcggaaggaacgaatagcaagcagagcgcctatttcggtgccaccggcaagacgcggctcgagtttgccgatattgaattctccgacgacgaggacgagattgactggatcaatcggcagcatcaacagccccagcagcagcagaaccaccatcggggtcgggttagcaatgtcggagttggcggtggtggggtcactgcctcccttcgacacccgccaccgttgacgaaaatcaagccttcccttgcgccggttccctcgctgtttcccatccggacgaagctaaccaatggcactgcagatgggtacaacagtcgtccatcgtcggatacgttcaagaaaccgttcgtattcaaatctcaaccagcgacacaacagccagcaccaccgccgccgtcacaaaccaaacgcaactccatcattgcccagagctacaacatgacggaggtgaacaagtaccgagccctgctgaagcgactgctgccgaatctttactcgccggaggaaccgcaatcggccagcgcatcgcgaaagaactccctactgctgtcgacggacgatatcaacctgtcgtcgtcgacggccatcaatcacagccacggggaaggcggccactcctcgaaggtggtcggtccatcgaccagtagcgcggcgatacgctcgattccggtgattgacctgtcgctggaggagagcgactccgagggacggaagaagcgcacaagcttgttcaccaccgtcgacttgacgcagtacagtttgaccgccgaggacgaagctgaaacagctcaagtggtagatccggtcaataccctacatgagaagctccaaactaacagcaagttccgtgaggacatcctggacacagtgcagcgcaagtatggcagcacttccagccaacgaaaggagctcatcgcacaggaacgggaaaacttgaaggagcttaagaagagcacccacgagtatgaggtaccgttcgagcggaagctgggcgatttcatgctcaagtttgacaccatcgtcctggacgaggaagaatcggaagaggatgaagaggcctatccggagctgaccgacgagcaccagggtgtgatcaagcgggccctctacggcgggtcgcgttcggaggtcatcatcaacaagttcaacatcagcattactcgcaacgatctggccacgctgatcggagacaactggctgaacgacgaggtcatcaacttctacatgaacctgctgatggagcgtagcgagcagcgcgccgacgacggtcttccccgggtgtacgccatgaatacgttcttcatcccgaagttgctctcgtcgggccatgccggcctgaaacggtggacgcgcaaggtggacatcttcacgtacgacatcatcccggtgccggttcacgtcggtcgagtgcactggtgcatggccataatcgatctgcggaaccagtcgattcggtactacgactcgatgggcacgcccaacaatgcggtcctcaacgcactggagcagtacctccgggatgaatcgctggacaagcggaaacaacccttcgacacgagcgccttcgtgaaggagaatatgcgcgaatgtccccggcagatgaatggcagcgactgtggcgtgtttagctgcatgtttgccgagcacgaggcccggaatcgggacattggctttacgcaggcgcatatgccctacttccgccagaagatggttttcgaaatttcacagggccgattaattacctaaagtggaaagcaagagagagggagtatgatgtgtgtgcttttgggagtgcaagacttctctgatttgtttgtagaatattgcaaaacaaagaattattgccggtaatgaatcaaattgagaaagtgtagctcgtaagccttaatttataatttagattccagaaggaaggacataaaatcagttttgttttagaaaaacatttacaaaatattctttgaaaaaaaggtaaaacagatcctcgtttgtgtcgcagcacttctcatcacgtttcctatggaagatgatgtgtctttgtgaaacaattttgaaataatcgatagaaattgtgattttttggtccgacacacgaattacgttctagggggtcccgagcagagcagagataacaaccaatcgtgtgtgtatgagttgggaattagaagcgacaggtgaacatcaagtgctagctagcctatttcgaaacagaaaagaacgaaagagcgcgaaagtgtagcgtgacgaaatacatgtatatttgaaaggtaatttcaacaaatttaaa

SEQ ID NO: 365 - DNA, 741 bp, Aedes aegypti
atgaaggaaccaagtcaggaaccggttcagaagagggcccgaatcgagcaggtcatcatcgaggatgacgatgacgaggagcaggaggaacagaacgaacggctaaactacgaaagcgagcaaacggaatacgaagagttcaacctggacgacttcgaactagtggaaggccaagaagtggaccagtactaccagccggaggaaccgctcatcgacaacagcgccatcctgacgtcgattctgctggacgacgaagaggacgacggaggtaacaatgcgctactcatggaccaaggccactacgaaaaagtctacccgtacgagtgcgaattctgccggagacgttactcgtcccttacgaagctggaatcgcacgtgaagtcccactcgcagaaccggatgaagtgcttcatatgtggcaagctggtcgtggtccacctgctgcggcatctccgttcgcaacatcccgggatgacgtttccagagccggtgcgctgttggcactccaagtgctccgatttggaccaagtgttcctggacgtgaatcaactgttggcgcacatggacgccaagaggatgaggagacggtaggataccgtggctagaatagtgcgtaaatcaagtgcctttttactattaatatattatttaaggttgatgagactgtacatatataaatttttgcgctcaaaccgatagatgcaataaagtgagtatttttgtcgaagtattttagaaaag

SEQ ID NO: 366 - DNA, 3752 bp, Aedes aegypti
gtgttggattctgttttgtccagctggagctaaacgtaagaaccgttacgaagagttcgttacatatcgaatgtgataacagaacaggacatggttggatgacgcagtgatggagatttcttccgcgacggccggcctttctagctcaatggaaacatcaacccactctccgggagagtagagttggtaggagtcttcactgatcgggtgcatccagcagtcgacacccggcttccgacagagcagcttccagttgcttccgtaactcttaagcactaagaagaaaagtaaaaaatcgtccttctgccaagtgggtcagccccaccactcgtcagcctggctcgattcgaaggcggccacaaaatggcacggcacatcatggcggtgtgcgtcgtgtgcttactgtgtgccgatcatttaccctgcaagcaacacgacgccaccctggactccggcacggatcctcggttagcgatgaattccattttggcggtaaacaaagtgcccacggtgaaacggcacacccacgggcacgaccatgatcacgatcacagtcacgggcacgattacggccacgcggatgaggatcagcacgatcacggtcgggaagcagtgattcgggaaaagttggacacttttatggtgtccattttcaaggagtttggcgattccacctccatgacgatggatgtggccggtttcgagaacatgatgaaacggttgaatatgtatagactggtgacggaacggctaggtggaagtagtagtagtagcagtagcacagcttcagcgtcaattcacgatccggacgcggacagtgacgaatcgtgcatcaatagtgttgattttgtgaaccggatagcgattcccaagccggtggcaatggccacgttgcgccccgaaaagctctctcaacttacttacgatagtgcagctagcaacagcaccagtagcgataagtccaatgccaccgtcggaactgacggtggaaccagtagtaatacacttagcaatagtaataggacctccggagggaaatccaacggtaccaacagcggtaacaccacgagcgaactagatcgattgaaagcttcgatccgcctggaacgggacgatctgttcaacatatgcccgattctgttggcgcagttggcatcgaaaacgtcccgacagcgtgccgggtgcatcgatccgaatgtggttccagatctggccaactggacaggtgcaacggcgctgtatccttcgaaggagcacgttggggaacacggagatgacacgatcgagatggcggtctggatctactccacgttggccgtgttgggtgtcagtttgtgtggtttattgggcgtggctgtgataccttgtatggataagcacttctaccagcatgcactgcagtttctggtggcactggccgtggggacactttgcggggatgctctgcttcatttgcttccgcacgccatgatggcaacgacgatgaagaattcacacgacgaaatgatgtacaaaggtttggccgccgttgggggcatcgtattcttctactttatggagcggattctgacggtggtggccgagtggtacaaacaccaggcgaagaaggacaaaccttcctcgcgggtcagggttatgcgagaacccgaatccagttccttgcagcatgccggaagtggcgagaagcagtgcaagcacaagtacagttcctatccctattgctacgatgagatcgcaacggaaaccaaggatgatcaccacgagcacaaccacatggagaatcaccaccacaacaatcataacaatacgacggccaagtgcgccaacaaccatggcggagaacacggaggggaacatgctggagattacgtcggtcttcatcacatcagttccaaggacgattccaccattcaggacaacaataccgtttcgacgaatttggatgacgcgtcgatcgagagcgaaccctccaagccgaaactgcaacccgagagctataccatcatcctgcgggaacacgaaacgaagcaccacggacacacccacatgcacggtcacgtccactcgccaccgggatcgctgtcagcggtcgcctggatggtcatcatgggcgatgggctacacaacttcaccgatggaatgacgatcggggctgcgtttgcgaacaacatcgccggtggattctccacggccattgccgtgttctgtcacgaacttccgcacgagctaggggactttgcggtgctgctgaaggcgggaatgtccgcccgggatgccgtgtactacaatctgctgtcgtccattctgagcttcatcggcgtgatgatcggcattgtgattgggcaccagccggaggcgtcggcatgggtgttctcggtggccgccggactgttcctgtacattgcgctggtcgatatgattcccgagctgacgtccgctcacggtgcggaggaccgctgcaaaacgtccgagttcctgctacaattcttcggcatgacttccggcttcggcatcatgcttctgattgcgatgtacgaacatgatctcaaagaaatgttcgtcgattagatttaaaactgagctgtcgacagaaaaaaaaataggataaaccacaactcacaatacaatagaacttcactactattaggatgtgtctcaaatgattggccactaccggaaccgggccagagcagagagagagagagagagagatcgagagtgtgacctgtagaagtgattgacaagaaccattgtgcatcggtcggggaactatagatttaagcgtgtttgacttcggtaacacttttgagaattgcgaggcggccctccctccaagaagggaagatgagataaacttccaaccggaactagtgtacatagatcgaatacgtgtgtaacgaatttcagttttgacttgaaagttagtaagctaaaagtattagtcgcggcttttcatcttgctcagattttattttttttaatgaccaaaaaacatcaatttctactgataaggaattttccactataattttttgctattataatttcttataattattttaattaatacagtctaaattttacacttttgtacaaaaccaataacacatttttaactacgaaaaggacagttcactatgccattcacgacattctcgctaaacctagagtttcgtaccgacaattatgtgacttaacggggagctgcttgagctcccccccggtatttacagattcactgtttaatcaagttcacttgccaataatgttccatctgatggacgcgacactggtggtaaacatccctcccctcccattgtgcactgttaaatagccgttagagagatacttacatagaaactacaagcatttactaattgaagaaagttttctttctttgtgattctaatttcgattctgaacaacagcgtcactgctgttcatcttttatctacgcaaatcttttgtttctagctcctaagtaggtacgtaacaaattttagtgacctcttttttctgcagaatgtgctaactttgatcagagtattaggattgtaagttggttgcaagaataggttaggcaacagggagtggtgacgaatggtgatgaaatatcgtcaattttcgatgaaatgaatttgtctttttctagaccacacacacgcactttacagaaccgtgtattcatcagcttctgaatgatggtttacttaagtaagattacagccgtaataaatacacactctttaagt

SEQ ID NO: 367 - DNA, 3207 bp, Aedes aegypti
atgcttcgtgtatccgatgacccaccgtcgaaaacggtatccggtagtgaagaggtccaacagcagccatccgcaagcaccagcacaagtagcagtagcagtaacaactacctgacggtggacaaaaagaaacgccaggtgacgctgtgtgaaacgcaaaccaacttggcctgtggtggcactcaggaacggggcccaatggtatcggcgccgaaaatgtttgcattcgatgcattatttacgaccgaggactcgcagcatgacatatgtggaagtgcactgtcggaggtaataccggccgttctggaaggatcggatggctgtctgctatcgttaggctatccaggagcaggacaatcacgcaccatgttcggaacgcttgcttcggctccgtcggacctcggcgccattccgtgcgccatctcgtggctctacaagggaattaatgagaaacgtcagaaatcaggcgcgagattctcggtccgtgtcagtgccctaggcgtgaacgcgaccaaaccaggctcgtcgtcgagggatttactcgccggccatgcgacagagtcggacgattcgccgggaatgtacctacgggatgactttctcggccggcccacggaactacgtgccccgacggcggaacgtgccgccctcttcctggacctggcactgtccggtcgggcacagggcagcagtaatttcgaaccggcactaatttatacactgcacgtctaccagtacagtttgtctggcaaacggggagtggaaggtggccgaagtcgattgcacctcatcgatcttggaggctgtgccaatcggagtgggggacttccgttgtctggaattggaaacgtgttgttggcgattctcagcggacaaaagcatccacccaacagagaccaccctttgacgccattgctacgggactgcttggccccgttgacctgccacgtggcgattgtagcccatgtggcacactcacagtcacataccgatacgttaacgacgattcagttggcatctcgaattcatcgacttcgtcgtcgaaaacctcgtcaccatctgttcgccggtagagcagcagatcttgccggatcgtcgggacatcaatcgggtggttcttcggaaggccccgatccatccagttccgacttttctcaggataccgtaatctatgtgggtccatgtgatgacgctaccgatggagaacatccaccggtctacttgccaagtctcaactctggggataaccgctgtgccatgaataaagtcctcaaaggttctgcagcggaaaaacccacctcaaccccaacagcctcaccacagaaaaagaaaaatacttccacatccaagcgtaagagcgacacccttccccatcccgggagaattagtttgttcaaacccgattcttacctccttacagctcaaaatcctgtcccagcaccgatccccactcgtaccgatagtcttaagaggaatcaaacgtacaatcaacaatccgtcgctgcaggacccgaactggtggctaatgctatccaaatcgcttcccagcatgcttcccctaaaattgtagccggagctttcaagcatgtagctggcgtgagtagaggctccaacatcccaacgcccaagagttcacccatgagacgtcctactcctgctgcggcttcagcagctggctctgcaacccgtgaaagcccagctcggcaacttggggaagaaaagtggatcgacggtcctcgggtatcgaaatccaaggttcatgaagctcgacatctgctaagagaaatcaaccacgtcaagagtcacgaaacctggattgatggaccgaaaacagcgagcgccacccaggtatttcttcctccagcagcgcacagcaatcaaagttacggtttcatggataaccacaagaaatccatgatccgacaatgggttgagaatcagtccatgcagctactacagcaatccgtctctgccaataattctccagttcatagtagacaccacagttacaatccacctcgtttcaaacccagcaaatccgatgaggatggattcgtactcgagcttgaacgtcaggaagagcttataaatccaattgctgataaacctgtgagtaagcatggcgacagccaagaagaggaagatcaggacagtggaccttcggaagtcccaccagcactgccattgatgaaccccttgggatcgcgggaaatttcccacgaaagcatccatcacctatgttcacggcacgtatcgcgagacaacatgagtgttcacagtcagcatagccacaacgctggtatgatggactgtggtctgcaggttacggaagatgacatcgcccggactatgggaggggagcaccccctgagtgcactgagtcacggagacgtatccgtcgtatcgagcttcaacgtcgctggagatgccttcagcgattgtgtaatcggtgatagcatgcggaaccaattcgaccagcttgcccgattgcgggaaatcttcacctctcagttagcaatggcagaggtgactccggccttccgtctaggtgacaccggtagtgtctacagtgaacctgcctatcgcttcaacacaggggctgccagcgtttgtagtgagcctgcgtaccgtccaccgagtcctcgctgccgcgactgtcggcaatcgctatccctttcccgcagtcccagtcagtgttcgttacctagtctcaatgggatcgtcgcaatagccggtatggagcagtacgcttcccttcgacatcctgacggggcgtcggacccgaatctgccaaaattaggggaaaacaacgaagaacccatagaccccgatgaacacatccgtgaaaaccctttagcggagctcgacgaacaggaagccctgaaagaaagtacctctcttcttcctcaacaaactctcccaactctgcctcttcttccgctatccactccagaagcctatgacagtggtcacgattcgactcctcgaacctcgaaacattccggcatttctcggagggcggaaagtggatatcacagcgttggaaccgttcgtgacagcgacgaaagcagctttggatcggctgcctcccgtgccaatcagaaatccaagaaacgaaaccgccatgacaaatctctctgccactggctgcggaatcccttcaactgtacctatccggacacggagggcgacgttagtgacttttag

SEQ ID NO: 368 - DNA, 1767 bp, Aedes aegypti
atggccaggaatattctacaactgtcgaaatttccgcgagttcttttaaactcccaccgtaactattccgaggcatcagcacaatttccgaaaattacaactcactacactctgaacccccgagacaaggatgaaagatgggcagaagtcgacatggaacgtttcgccgacgaagccgatcttctgattgttggaggtggtcctgctggattttcagcagcgatccgtgccaagcagattgccgctgagaagggacaggaaattcgggtgtgtctggtagaaaaggcctctgaagtgggcggtcacatactttctggggcttgtctagatcccgttgctttgaacgaactaattcccgactggaaggagaaggaagctcccctgaacactccggtcacccatgataaattctcgtacctgacgaagagtggtaaattgccaatccccatctttccgggctggcctatggataaccgaggaaattacgtggttcgattgggtcacgtagtagcatggctcggtcagcaggcggaagaacttggagttgaaatctaccctggtactgcagcagcggaggttctcttccatgaagatggctccgtgaaaggaattgcgactggcgatgttggcatttccaagtctggtgctccaaaagacactttcgcaagaggcatggaattgcatgctaagaccaccatctttgccgagggatgccgaggtcatttatctaaacaactaatgaccaagtttggcctaaatgctgaaaacgatcctcaaacctacggaattggtttgaaggaagtatgggagattaaaccggagaatcacaaaccaggcttagttgagcacaccattgggtggccactggataaaaatacctatggtggttctttcttgtaccacttgaacgaaccaacgccactcgtttcagttggttttgtaattgggttggattacgtaaacccgtacattatcttcgagggaggcaatcgcattgcatatggagcacgtgccttgaatgaaggtggcttccaaagccttccgaagctcacgttccctggcggatgcttggttggatgcgctgccggtttcatgaacgtgcctcgtgtgaagggaagccactatgccatgaagagcggcatgctggcggctgagagtgcctgtgaagctattttatctggtgccactcaggacaaaacaggactggaaccgaaggactatcctgacagaatcaaagaatcgtatgtgtggaaggatctgtacaaggttcgaaatgcccgcccaagtttccataatgcattggggctgtttggcggtgtggcttacagtggatttactctgctggtcggaggacgcgagccgtggaccctcagacatggcgctccagatcatacgcgcttgaaaccggccaaggaatgcaaaccaatcgaataccctaaacccgacggaaagataacgttcgatctgctttcatcggtagcgttgaccggaacaaaccacgaaggtgaccagccggcacatttgaccctgaaggatgacaccattccggtaaagaacaatctcgccatttatgacggaccggaagctcgtttctgcccagccggtgtgtacgaatttgtaccgaacgaagagggtggcaacatgaaactgcaaattaatgcacaaaattgcatccactgcaagacatgcgacatcaaggacgtaacgcagaacatcaactgggtcgttcccgaaggtggcggcggccctgcctacaacggaatgtaa

SEQ ID NO: 369 - DNA, 1104 bp, Aedes aegypti
attacatcgctccggccggtgatcgattcgggatgctccaagcaggccctgttcctgttctgttcgtcgctgttcccgctgtgttcggccaatgccccacggccggtgcaaccgtgccgatcgctgtgcgagcaggttcgcaaggactgtttcagcgatgccgttttcagcaaactgtggccctcctatctggactgccggacgctgccccagccggagaaccacgggctgtgcatgcagcaccccaattcgctcctcgagcccggcgccacccggccctcctcgggccatcattccaccccgccggtctcctgtcccatcaactacaccctcgagtacgaccagtgcgtccccaagtgcggatcctcgatcgatgccatgtacaacgcgcgccagaaggaaaccatcgagttctggaccctgatcctgtcggcggcctgcttcatcttcacgctcatgtcgctggtcacgttctggaccaaggcctccaagttcgagtacccggatcggcccctgctcttcatgaccctctgctacaacctgatgggtctgtgctacctcgagagaactatcctccacaacccccggaaagaattgatcgacctgctggaatttcgccaagaatgcaacataacgtcccaatgcctggcttactacatcatcaagaactacctgctcatcagcgccaccacctggtggctgatcttcggcgtctgctggtacctcagcaccgccaagcaatggtcctgtgaagccctcgagaagaagtccgggctcttccacgtgatggcctgggtcgtaccgttcgcctcacccatcagcgccctcctccgtggcaacatccagaagttcgagctcacaaacttctgcaccgccaagggcttcaccgaaatccctgccctgatcctactccttgccggagcgaccctcatcctcctcgccctaatcgctctgaaacgcctcaaatccacctggaaccagagcgaaaccctctccaaagtcttcgtccgggtcctactcttcgccatcatctacctcatccccgccctgtccgccatcatctgcaccttcttcgaacgcatcgagaaccccatcgaaccttgc

SEQ ID NO: 370 - DNA, 1876 bp, Aedes aegypti
ctgctgtcatgccggccggtcgtccatccatcccatccaggcgaagcggcctgtccaatccaacccaactgatgatggtggtctctgtttgttttgttgttttttgccctctgcatttctattcctggcctgcacacctagccgtgctccgatgatgccgaatgccgctggcaattgagggtcgacggcgtggtggtggttctcttccgtagttgtgaatttctccagcagcaatcagtcgttgctgcagccgctccagcagctgaacggtccgaaatatcgtacaaatctgtccagtgccctccatgtagcgcgttgcttttttttcttggatattattttctaatacgaggtggtaattacacatccacctaccgggagaacaaacttacgttttgatacagtataatcgccctcccacacctaccagtgaattactattattacggttggcaagaaatgttttacaacaacaacgtcttatcgtcccaactgaaagcttgccggaggacttagtggatggctgtgaaggaagaaattggtccatcgggaatgcagcaaagttgtaagagtgaattgtgagcactgctacatacaaccagaggggctcgattagatcgataaataattcatgcatattcaattgcacgaagttgcggttatttcgagtcctgggaggggttcatcgatacaactgtaggaagggagccaccagcaaggacgaacaactggtagatgcatcgctacaaggttccacagccggatgagatacaaaagtagccggggtccggtgctaaggtcaagcgaacgccgccgtccacagagtatatcgtcgtccacctccacgctactgccccgtgtggttctgaatcgcatcgacccccgcgagtttgagcgcatcagagtctcgtacaaggttgccatccggagcacccgcagcagtcgtaccagcagcggtgcccaccctggtatgaacatgggccaaaagatcagcggaggtgtcaaaacggtcagcagccgcgaccaaccatcgccattcattccgaagatcccgcgcgaactggcggcgcacttccagcgaccggcccgtctcgatctcctgctcgatatgcccccggccgcccgggaaacacagatcaaatactcctggaactcggaggaccgctcgctgaatgtgttcgtaaaggaagacgacaagatgacattccaccggcacccggtggcacagagcacagactgcatacggggcaaggtcggcttcaccaaagggctgcatgtgtgggaagtgttctggtcgacgcggcagcgaggcacacatgctgtgatcggtgtggccacatccgaggcaccactccactccgtaggttatcaaagtttggtcggttcgaacgatcagagctggggctgggacctggggcgcaatatgctgtaccacaactcgaaaacctgccccggagtcacataccctgcgatacttaaaccagacgaaaccttcctagtgccggacaaattcctagtagcgttagacatggacgagggaacgctcagcttcatcgtcgatggccagtatctgggggtggcgttccgggggctcaagggacgaaagctgtacccgatcgtgtctgccgtctgggggcactgcgaaatcaccatgaagtacatcggtggcctcgatcccgaaccactgccactgatggacctgtgccggcgagttatccgccagaagatcggccggacgcacatggaggagcgcattgaacagctccagctgccacagtcgatgaaaacctatctgctgtatcgggatcgaagataatagacaacccaaaagccgactattaattatttaataataattattatcgcttattattat

SEQ ID NO: 371 - DNA, 2743 bp, Aedes aegypti
ctccgtcgtcgttcgtcgcgctaaagaaccgtggccgtggccttaaattagtttcctcgcggacagtaactggatttcagtcagaatataaccactaactgttcgaatcgtgcggcagcttttcgctgcagaagattttccgctggttttcactcaacggggactcgatccgggatgccggaacagaatcagaaccagagcggtgccccaggggctcccgctggcggcgaagggcaacccctggtggccaacgatggaaatgcaccccccggtcaagctcaacaagcacagcaaccaacgagagcggaatcattctttgccatcacgaaatctctgatcctccgggccatggtcatttacttcatttcgtacatgttccgcaggccggccccgaatgccgaggtcaatactcaggccgggggcgccgcagggcagagcaagattacggcatggaatatgttcgagaatggaaccatgttcgatctgcacgtgtacatctcggaggatgcccaggaagtggacttcaatgaccccagcgcgctgatttggcttcaggaggatttgatgtacggagattggtacggaggtcgggatggcgatggaacctatacgctgagcacccagattaaggcatcggatcggttgatgaacaacgggtccatctatctccatacttatgtcacgagggctgggaagagtccaaatccggcagctggggatgactatgctgggaagtacatgggatatgccacagggatgctgagcaagtacaagaagattaagcgagtcaagacgcacaatttgcttgccggagagaaggagaagttcgagaaggaactggacaatgccctggtggaggaccggatcttagcccactggcatccgaatttgacgatcaatctggtcacggatcaaacgaactgggtcaagggatcagttcctcctccgctggacgaatatgtgaaattccttccgggagcccaaacgtatcttccaatcgtgttctacaacgactactggaacatgttacgagactatcagccaatcaatgaaaccacccctgtgttgcaactcaatctttgctaccagccactttcccttttcaagtggcaactttatgccgcccaaaccatgcgtaacaagtggacaaataacatcttcggggaggctttgactggcggagttgaatcagatgaagatcaggactccctgaaagagaccctcctagaaacgaatccctaccttctaggcatcacgattgccgtttctattttgcacagtgtcttcgaacttctggccttcaaaaacgacatccaattctggaaggacaggaaatcgttggagggtctctccgtccgatccgtcttcttcaatgtgttccaatcgctgatagtcctcctgtacgtattggacaacgaaaccaacttcatgatcaagatcagctgcttcatcggacttggtatcgaagtttggaagatccaaaaggtcgtaaatatcaacatcaacaaggaaaatctgatgtttggattcctgcctaggatcaccttctcggacaagggatcctacgtcgaatccagcacccgacagtacgacaacatggccttcaagtacctgggctgggcctgcttcccactcctcatcgcctatggcatctattccgtgatctaccacgagcacaaagggtggtactcgtttgtgctgaacatgctctacggttacctgctgacgttcggattcatcatgatgacgccccagctgttcatcaactacaagctgaagtcggttgcccacttgccgtggcgaatgatgacctacaaatttttgaatacattcatcgacgatatctttgcatttgtgatcaagatgcccaccatgtaccggctgggatgcttccgagatgatatcgtcttcttcatcttcctctatcaacggtggatctacaaggtggattcgaagcgaatcaacgagttcggcttctcggccgaaatgctggaagagcaggaagccaaatccaagcagacgaacgcactcacgagcggtggttcgggtgacacagtggccgctgcttccgccggtggagcttcctcagacgaatccaagagtcaaccgtcgtctcccaatgccggtggcgccaaaaagcgaaagaacaaaaagtcttctcccaaagctaatgctaacaagaccgttgccgataagaaagatgactaattcctttcgacatgctcattttcggttttgctacgcgcgttaagttactattacaaaccacatttaccgccgggaaggttgagatgcttgaccttagctctagattcacgttgtaggtagtaagacaagtggtgattcgtctctaaattattgaaactatttgaagcatagctattgtcgctgtcgttttaccgttccatggatggtagaatgcgtttgcaggcgatttttatttctgttaatttcgaatcccagttggaactgcaatggcagccgtattttagcttttaaacaactagaactctagataatataaccttgcggtaggatcccactttgagagacgctcgtatcttttgaaatgcaaatgtttcggagcgaaactaatcgttaaaataaaaaaattaaagaactatcagacgacgaatatatttatccactgtgtagctaaaaatgttgcactacgtagtattgtaaaactcaacttcgggattacgaaaccaatataaatgaagataataaaaataatgtattc

SEQ ID NO: 372 - DNA, 1637 bp, Aedes aegypti
gttaccccattttacggtacctactttgcaaacctagtagcaaacattgtatggaaagggaatgagtagtccgagaaattttttttttcatatcaatccaactgatttggcgtcgacgcagttcacgccaccttgaggagctcacagtgccatcagaaattgaatgatgagaagctttccgttggtggttgtgttaattggatgtgtctcgtgtggcgagctaagcgatgacgggtcaggattgaatttatgcagacagaaccttacggacatcagtccgagtacagaattgatcagaaaagcgccttccactgttgaacacattacgttatgtgaaaataatataacgacggtcaatccttcatcgttccaaaaattagatggcttggaaaaattgattctggacaacaacgaatatttaaatttcccttccaatggaagtcaattcatttatcagggctctcttacggattttttgtgctttcgatgtggcgtggacaaaatatacaacaaatcgcttgctggaatgccgcgtctggagcaaattaatttgactgaaaacaaaattacacacattgaaggtggagcttttcagggcaatggaaacctcaaagttatagaattgcggaggaatttgttacaacgtgtaccaagagagatggtggaaacacttgaacatattttgaaagtggatttaagtttcaacaatgaactcgctcctgaaggtgatcagccgttcttgatcagcgatgctcttgaagagttatggtgtatccaatgtggttttgaaactgtggataagcgtacattttccgtattggtcaatcttaaggttttatatctagaaaataacaaaatcacacaggtccacgctcgggcatttgaccaaataactctaagacgatcggattcgggaacaaatttgctggtttcgcttgaaaacaacaacctcaaaagaatcgtctcagaagtgaaagctggtctgcagttgtgtctgcataacaatactattgaattggaatgttttctcagagatatcccagataaagatagcttcgtatgccgcaattcaactcatcccgaagttgaatgtattccaccaaccactacgacactggccacaaccttgaccaccgagtcatcgaggacaccaacaatctccgccactatctttagcactatcccaattaacaccgatccaaggcaagctgcaaataaccctgccaccagtccagcttctacaacaccaactccggtaaagcctcctgaagaagtctacggcatctcggatgcctatatcagtggatatctaacattgctctatgtagcacaaatcatcgggcttgccatgctttccgtagtttggtttaggctgaaaaaatccgattcagaagtggatcgatacgcggagaccattgtgaatccgaacccgaactatcgggccatccagtgacaacattttaggcttacaattattagtcatcgccatcaggcagcattttattcgattgatatcagtagctttaaggacggatcggattgactagcatgcgaatgaataatctcccttgttgataagaatttgtagggaaaccgttatcagttatgaaaacaaataaaccaacgaattgcgaacg

SEQ ID NO: 373 - DNA, 1894 bp, Aedes aegypti
aaacatgacataacaaaaaatgttgagtcatagcagtcaaaaatattatttattaaaaagtgtacgggcaatcaaaagagcgaatcaaaacagaaaaaaatatacaccagtccgatcatcggaggaatcgcaatccccacgagccattatagtcgttccgaagttctcgcccgtaacagttcaagttcatcaagccaccaggacggctggcaagcaactcggctcgtgctcccttggcaaaatccacacccaaaatccatcggttcagtattcgcgcgcgaagcgtggcaagttcaaaagcattctaaccgtcagctgattcggaagcacttttagtcggtgtgcttattgctatcttcatcagactcttactctttcgagggtttcacttttacttagtggtttcgcttagaagcgtctggttcgagaagtttcataagaggaaatctcttcttaccccctccccgtgtgaactcttcgacgtcatctggcaccgttgattctgcgatgcgtcccctagttcgcagtaccagcacgatgtctctagtgccggttcactaccgcagctggtgggatgactgggatctgccactgtattcgcgggttatggagaagtccatcaccgaagaggtcctcagcgatgatcccctctggtggcgtcatcccccgatgcctccgctacgctggtccagtttgtggcgcccctggaagtacttcaccctgcgggacgtaggctcccgggtcgattcggaccgggaaaagtttgtgatcgaagtcgacgtgcatcagtttgccccgcacgaggtcaccgtgaggaaaaccgataaatacatcaccatcgagggcaaacacgaggagaagcgcgatgagcagggttacgtctcgaggcagttctcgcggcgctatctgcttccaattggatatgatgcaaacctggttgtatcatccctctcctcggatggagtcctgaccgtcactgccccgagaatcggtctgccagccccaaaagtggagaaattcgttcccatttggcacaccggcaagcctgccatcgaggataagaagtaaaactcgttcacaaatcgtgagccgaagatgtcaaaatatcaccttcaccaaagacaacataccaaagaacgagcgagtaaaacaagctaaactccgtacatctaccaaaagcagttcagaaatcgaaatctaccagagaccacatttgaacccactgcccctcctcccaaatttgaacagctgcagttgaagatgaaaagtcctatatttcgaatgtttggtttccgtttcgttttttgttgttgctctcattttccattgttttaggtgcaaccaatatggtttgttgatcattgtattttatttattcttttcccttccattattgtagttttcgaatcgggttctaccttaaatagattttgttgaggcaccttacagctcagacatgatactcaccttgaaaacccgcgaaaggcacccgaaaataaaaataagcataatataacgaacagcgccctctcgcgtagcagaatggcacgatatccaaaactcaatcgggaaaatattgacagaaatcaaatcgaggccacattgtgatgcacagacagcagataacaataaaacgcaaacttcaactcaccagacaccaaagattgcgatgatggtaggctctcggagtggagagtgcaatggatccgtcgtcgtgaaataggcttagaatatcatcgtagcgaatgaaagtgactaatccatcctagctggcatgtggcacaaaatgtgattcaataatagtgtacgttatagatgtgaaaattttatcgatacatttgattgattgttagttaacagaagaataaaccgtcacgttttccgaaatacatca

SEQ ID NO: 374 - DNA, 1048 bp, Aedes aegypti
atgcgtcccctagttcgcagtaccagcacgatgtctctggtgccggttcactaccgcagctggtgggatgactgggatctgccactgtattcgcgggttatggagaagtccatcaccgaagaggtcctcagcgatgatcccctctggtggcgtcatcccccgatgcctccgctacgctggtccagtttgtggcgtccttggaagtacttcaccctgcgggacgtcggttcccgggtcgattcagaccgggaaaagtttgtgatcgaagtcgacgtgcatcagtttgccccgcacgaggtcaccgtgagaaaaaccgataaatacatcaccatcgagggcaaacacgaggagaagcgcgatgagcagggttacgtctcgaggcagttctcgcggcgctatctgcttccaattggatatgatgcaaacctggttgtatcatccctctcctcggatggagtcctgaccgtcactgccccgagaatcggtctgccagccccaaaagtggagaaattcgtccccatttggcacaccggcaagcctgccatcgaggataagaattttcgaatcgggttctaccttaaatagattttgttgaggcaccttacagctcagacatgatactcaccttgaaaggcgaaaggcacccgaaaataaaaataagcataatataacgaacagcgccctctcgcgtagcagaaaggcacgatatccaaaactcaatcgggaaaatattgacagaaatcaaatcgaggccacattgtgatgcacagacagcagataataataaaacgcaaacttcaactcaccagacaccaaagattgcgatgatggtaggctctcggagtggagagtgcaatggatccgtcgtcgtgaaataggcttagaatatcatcgtagcgaatgaaagtgactaatccatcctagctggcatgtggcacaaaatgtgattcaataatagtgtacgttatagatgtgaaaattttatcgatacatttgattgattgttagttaacagaagaataaaccgtcacgttttccgaaatacatc

SEQ ID NO: 375 - DNA, 2306 bp, Aedes aegypti
tggctttgggaccaatgagcataggttataacttcaataaaatcctttaaatgtttaacatttgttagcctctatatcaatcctaaccaaatatttgcgatagtatactgttaacttagtgtaactccaaaaagtccatatcctgggattgtccattgagtaggttaaggttctagaggtaccgaaaagcatgaaaagagatggcctaaatgtagaataaaacgagacgaaagagaaggctgattaaaattctcaaaactggagtggcattctgaatggatgatctcatattattattgagagctacaacttcctagcccatatattcaaatgacctgagcctccggtcaggttcaagacagtttattagcttatgtttgttgactgtactgtgaattatacgacttgaacgacggtacttatgatccgatcgcatctaaacaggttcgtttttgcttcgactcggtcttcttgccattttcagttcgtcagtcgatcggaacacaacttttataagacagcgcttcatcgttatcgttggtattgatacacaagtggttcattgataccagttcgcagaaaacggaaaaagtggttgaactttataaaaatggcgaaatttctggttctgggactcgtcgttttggtcgcgattgccgcaatcgatgctgcctcatttggtcagtgtccggtgtcttccaaggtgcaaacctgcactccaaaatgcctgagcgatgttgattgcagcactagcggaggaaagtgttgcccgaacacgtgcaactataaatcttgcgtcagtcccaaccagcttacgcagagtggatcaagcggatcgagtggaagcaaatatcaatcaggcggagccggaacttactgcggaaatgttaaatgcagcgctcacgagaaatgtgacttggacaaatcaaccaaacgccaaaaatgtgtacgagcttgaactttatttgatcggaaacaaattttacaaactttttacaaataaatagacactgagctaaaacatttacacttttttcggatgctttttgtacgaaggtcgcgcaatatcgtcggctgtgatcgagtacgatccagatagtgatgatgaaacgtcagcctttccatttggatcttcctgtggcccttctccgatggggatggagatctccttcaccaatcggtagcctttatcgtccgcaacgtaatgcacttcacgcttgtagaacccatcactgtatgcatacattcccttcagtgctaatccttcgcgggtttcctgtcgttgaacggtttgatcactgatcgtgtccgtgatcgacgagtcatacgaataatgtgctgatttggcttgaaattcttccaaagctttatcgtcatccttccgcagattcctctcgtttttcctcgcagattcttgcggaacactatcaactacttcatacttgtcacgatcactttttacaggaagtgcatcggttttgccgccaacggttaaactgttctgaggtgcagctaaacacagcgtgccaagtgtggcaagtataacgattgtgcacctgaacgacattgctcttaacactactctagaaacaatactaattcctcttcctggccagcctgatctatatattgaatttttcgtccaaggtcaaagacgaagacttcatgccacctaaccggccctgagtgtgaaggagcggtaggcttcttctcttgtcgtctcttaacaagttgttgtacccatcttaaattatttaccgcttctgccgtgcaccgtatagagctggtaagtgccgttggcactcgtcgtttgtatgaattgttagtacacccatttaggaatggaagaacaacgaacaagtttcactttcttctttgcccaggcgccgtttattggtaatgatcttgcgccgacccaagttcagtatacccagataataaccgatagttcgataaactctaccagataacgaatgatggtggggaggatgcgcttcaatgtccttcggcagttataaattgatacgtgcgtacaataaagtgattgcatatagatactactcctcacctcaacacgtgagtgcgtaaacctgtcgaacaagcggaaacattgagatgttgcactcacatgcaatttagaatatatactgcgtcttgcttagaaatatctactaagagatgttcgaaattcattagcattcaatttgcataaatatctgtaataatttgttagtcaatcatcaataaagcaattatgcaaaatattttcccgggatgaatgtcatatcacatcatatcatgtcggc

SEQ ID NO: 376 - DNA, 11007 bp, Aedes aegypti
gtgtgcttgtcttctcggtggctttgtttacgaaattagtcgcgtcgtttgcacgcgtctcaacggtttgtttgcctccgtttgtaagtgctcttccgcccaatatgtcgtaatacaccttgagcaggagaaaactaccctaccgacagtgaacagtcgacacatcatcccgtcaggttgttatgagttttataaaacgcagcgtaagaagcgttctttgttcttcagaacgacgtgatttgtctcgcgccacgccacagtctcaagcaatatcctcagtgtagaaatcccaggagattcctaccaggcgaaaaaaacgcaactgacttgatgaccatcgtccactgtccagttgtgaccggtgatagttaccggcgaatgaatcccgcaatcagtgagcatgaggccgcgtcgctggctgcagaaatgttcgatcatttctgcgcggccacgaccatgcgccagattctcggtttgtacagaaacatgtgtgatatcctaaacctgaggcccggtccgctgaatgaattctacccaaagttcaaagcgaaaatccgcaactggaaggcgcaagcgctgtggaagaaattcgacgcccgggcctcccatcgggtttacaacaaaggtaccgccgccagcggaacccgtgtactagtcatcggcgcaggaccctgcggtctgcgtacggcaatcgaagcacaactgctcggtgctaaagtggttgtggtagaaaaacgtgataggatttctaggaataacgtactacatctgtggccatttctgatcaccgatctcaaagcgctcggagcgaaaaagttctacggtaagttctgcgccggttcgatcgatcacatctcgatccggcagctgcagtgtatcctgctgaaggttgctctgctgttgggtgtcgaggtgcacgaagggttatccttcatacgagaactcgaacccaaagatggctgtggttggcgagcggccgtatctccagaggatcacgccgtgtcgcactacgagttcgacgtgctgatcggtgccgacggtaaacgcaacactctggaaggcttcaagcggaaggagttccgtggtaaactcgcaatcgccatcactgccaactttatcaacaagaaaacagaagccgaagccaaggtggaagaaatcagcggcgtagcgttcatcttcaatcagtcgttcttcaaggaactctaccaaacgaccggtatcgatctggagaacatcgtttactacaaagacgaaacacattacttcgtgatgaccgccaaaaagcacagtctgctagacaaaggtgtgataatacaggattacggtgatccagcagaattactgtcatccgcaaacgttgacacgtccaagctactggactacgcacgagaagcggcaaacttctcaacgaaataccaaatgccgaacctagagtttgcggtgaatcactacggtaagccagacgtggcgatgttcgacttcacgtcgatgttcgcggcagacaactcctgcaaaatcacagtccgcaaaaactatcgattactttcctgcctcgtgggtgacagtcttctggaaccgttctggcccactggatccggttgtgcccgaggcttcctgtccagtatggacgcagcctacgcaataaaactgttctccaattcgaaaaacagcgctctgggagtgatcgcacagcgcgaatccatctatcggttactggcgcaaacgactccggagaatctgcaccgggacatcggagcgtacacgttggacccatcgacgcggtatcccaacctgaacaaatcctccgtgaacatgatccaggtgaaacacctgctggacaccgacgacctggccctgttggatcaaatgttcctggacacgaacgcgctgacggcgggaccggaagtgatcgtaacgaagcggaaacggcgaaccaacgatacggttccgttgggtactgtgctgctgcggtgggtcaagtcccagctcaagggtaacgactttgtgcaggagttgaccgatgcggcgcagtgctttaccaatgggcgggtgttgtgcactctgatcaatcggtaccggcccgatctggtgaacttggacgagctggacggttgcgggccggatgagtgcaacgagctggcgatatcgatcttcgaggatcatctagcaatcccacggatcatgtccggtcaggaatcgctcaccttagccggcgtggactccaagctgtggctcaactatctggagcagatttgcgaggtgttccgcggggaaattccgcacgtcaagcaccccaaactggactacgcagagttcaagcagaagcagcagatcgacagcatggaggagttctccaagctgcgacggttcgcggccctgaaggctacggcaccggccgccgttccggtgatcgtgcctggccccggagccgttgctggcttagggcggaagtcaaccaactatcacgaagaggaacgcatcaaacggagccgcagggtgctgggagcggaatctagtccaatggcctcaccacagaccgacacgacgaaacgagcgaagaaacgccgcagctacgaaaagtttggcaacattgtggagcgaacccggcgcctgcaggagatcgaagcgaaccggctcgatcggcagacgaagcgacgcctggcccgagcccagcagacccaaaacttcttcaccagtcttcacatgctgcaagcgaacactttactgcgcgaaagtggcgacgacagctccagtgccttcgaggactactcgctctttctgtaccggcagtcggcgccggagttcaccgatcgcgtcaaggagctagaacggaagctgctctatcccgatcgcgatcgcggtctagctgcggcgtacccgaaaggtctcgccggagccgatggcgaacagattagcgatcggatcaaatcgatggagcagcggatcggagggaagcatgttccgatcaccgagaagaagccgaaagatctgctgcgggcgatcggcaagatcgacagcagcgattggaatgtgaaggagatcgagaagaaaatcgaacaatcgaagaaagcgaccgacattggcaagagccgtgaacgagttccgaagtggaaccgtgagcaatttttagctcggcagaacaaactcacgcagcagccggatgatgaaaagtacagggacatcgacagttcactgaaggcgatcgaccgacagctgaaagagggccacaatctcgatctcggcgagcgtggcaagaataaggtggcttccatcgctggacagctactcagtacgaagcaacaacagcaacagcagcagcaacaacagcaacagcaacaatcgagtcagaaatcgacatccaaggccgcgttggttctcacttcatcaggcgtagcggagaagtgccatttctgcaagcagcgcgtttatttgatggaaaagatttccgcggagaacctgactttacacagatcctgcctcaagtgccaccactgccataccaatcttcgactcggaggatacgccttcgatcgggacgatccggagggtaagttctactgtacacagcacttcaagctgccatcaaaaacgtacaacaaaccggtgccaaagaagtcgttgacccgaacaccgcaagcagacaaacagcccctggcagccgcagcggcggtagcctcaactacacagccttccacgccggactccaaatcatcgggcttcatcaacttcaatctgttggatcgtggtgaaactccggagcgtatcgagttcgaaaacgccgacgagtccatctcggacggcgaggtaccgatggaggtcatcgacgaaaacgagtggaccgatcggaatttcggaaccgaatcggacgaatcggaggaagaaacgtccagctcggatgagtcggagagcgacagcgattcggactacgaggaagccgcagggtctccgctcggggcgcagacactgcagctggcgtccgagtggatcagcgataagcggttcaacagcatggttgacagtgacgatgacttctatggatactctagtgaagatgatgaagctgattcgcaaacggaaggcgaggagctggctcgggcacgagagatgcggatgcaggaggtaaaactgatgcctcctccaacgcttccaaccgacaccgaaactgaggttgcctcaacgcaacagcctccaccagtagattcttccgtattccctaatcttagcgcccctaatgttaataacccaccaccgctggagccagcagaatccgctgaagatagggctctgaaggagaaaatgctccagaagcttagcgttcgcgagcaatggctgaactcttctgccagcccgtcttcgtcaacacctgtcaccacagaggcgcctaaacccaaaacttccttctttggaggcctcatgaacagtcttagcacgcttatcaaatcggacaaaccagcacccaaaccccaaacgcctccctcttcgtcagctttacttgcaccaccaactcccaacgaaccaaaaccgactactccaattcaaacaccatccaaaaacgaacctccaccggcatccccgtcgccatcaatacgtcaaatgaagtcctccaccgcactcaaaccaccaccatcgccaacaccttctctgaagaagcagaaacgtcctgatgtacctccatccccaacaccatcacgcaaaaaatcgaaaacccctgagattccaccttccccaacaccatccctgaaaaagcaccgcaagcacaagaagtcttccgcttctcctactccctctgccggtagcgaagatgccgcctttgacgaaatgttcaaagacgacctgagcagtggtcgcagtactcccatttccaaacgtcgcagccgtccaaagtcatccagcgctattcgagaggatgccgatgagttcctcgagcaaatcaaaaaggaccaagctgcgctagacagacgcatgaaaaaggttgaggctaagaagttccaaagcaatatgcagtcgatcaagtccgccgtagagggaccccgtattgttggagttcgtagcgaaaaggatgtctccaaatttttcacctccgtcaagaaagaccagtttgaaccgaaaccgaaacatcttcctaacaaggacgtatctgcgttgcaaggagtcaatctgtctaagtatttcccaactagtagttcgactcccaccagcgccaaagcaagtatcggaacaccgtcttccgtgtccagcgttgaggggtctccaatggcatcacgaaagaaaccagatgatgttgaactgatgaaatactttggtcctaatacaacgaagtcttcaccatcgactccatcatcttcaaaggtatctccagcgatatcgaggaagaacagcgttgaatctccgggtgtaactcgtaaagcaatgcctgtcgccatcggtgccaagccagttactccagctgtattagccccgaagcctccggttgtaccgctccccccaaagaaaaatatcctagctttccaggtcgtcaaaaagtccaagactgataccaccgtacaacctgcagccccagtaaaaaatagcctggctttccaacccgtggccaaacaaaagtcaccttcgccaaaacccgtctcgaatgtagctagttctcctccaaagagtacgatcctgagaaaatctcccgactcagacgacaaactgtttgaaaatctattgaaagacgctcaagaatcccccaaaccaatttccaaacaatcacacatccaaaaactacccagccctcctaagcaacctgcaactcccgaagacgaactatttgaagatctgctcagagaaatcgacggatcaccaaaatctccccgtaagattccttccccaaaggcttcaaaaaagtccttaacacctccgaaacgccaatctcccaatctggacgataaactttttgacgatttgctagaagaaggtgacgagtccctgctagacaattttgacgagattcttggtctaccgaaaaagcgacaaagtcccaaacaggtaaagaagaaaaagtctcctccgaaaaagtccccaccgcgtgtatcgcccaaacattctccaccagccgcgaaaaagcccagcatcccccgaatgacggtcaagcgaccaccgttcaagatcattgttccagttaaaatgcaggagacgctggaggagatctacctcgccagtctgtcgaagctcgattcacgctcgacgtcgacttccagtttgaacagcaaagttagcgaccctggtgatctaggtaaggtcgatgaagttttcgaaaagctgctcgaagaaccggaaccgacgccggtcgagaaaccggcagaaccgtttaatattcagccctttcaggccccccagacgaaagccaagtcgagttccaatggagtcaagccgccagaagaaaaagctactagtaaggaagaaacgcagcagaggaccgtggtgtcatcggtattgccggtagttacaccttcaactccaacacaagcgaagaagatcatatctcaaacagcaactccgtcggaaactcccaaaatgcaacgtaaaactgctcagaatggacctacaaccgattctaatatgacggttgtagtcaaagaatctaaaattcccgtatcgacacctgtcttggcaagaaaggtgacaagttctccattatcaactccaactatggctaggaaggtttctcagatttctacggctattatcgtagacgatcaaacgaagaaatcaaatccagaagtcactccatcaaagtctacgggatcgacaccggcaaaggttatgatcactcaaaacataattgctcccaaatcagtcgcaattgttcaaaaggatcttccggtggataacccttctccggtgattcaggatggaatttcgaaattgacggacatatcttcgcctaattcaccactgactgtgcggaaaccaatcctgttgaagtcgtctgttgggctaggcacggattctcagagtaggaccaatgagagtcccaagtctgtatcgctgggaaacgcaaagaatgtagagattcctgaggtaccttttactccagtggtgcgccgaaaagcagttcaaccagaaaaagttcgcgagatcgaggtcgctactaaatcaactacggttacgcctccaaaaactaactcctcaaatgaagctgcggcagcagtttctacgattgcttctggtgctaaatttactccactgaccacgcccaaaatgcctccaaagttggttaattcgactgcaacttctgtgaatgctcctatcgaaaagcaaggatctaccgataaaataacacctaagacaactccagtgatgcctcgaaaactggttcagactcaaattgaacaaactgtaattccatacactttggatcggaaggccacactccagcccgaaccaatcaaggctcgcaaagtggacaaaccagaagctacttctacaagaagtcctaacgaaaagtcaccaatcgaatcaacgcacgcgactcaacaaaaggtaatcctatcagaaacgcctaaatctacggatagttccgaaaaatctaatccactggataaaatcattcctacaatcctatccgttgcggcaaagccttcggtgacacctaagcaagaagctcaaattccgacaaaagtttcccctaagactgacactcaacctccacgagaacgcaagctgtcttccgacgaaatctgtttcgaggaacttcgcaagaaacacgaagctattttccgtggtcaagacggttcgactgaagccacgcaatcgaagcatccagctgaacctaaactggtgcgggtgaaagaagtggatgttcctcgaacgctgtcggagttccgtagtgccatgatcatcagacatccccatacagaggacaaagcgggagaagaagccacccctgtactgcgtgagaagatcaacgaactggccaatgagcttatgccgggagcgaacctcgacgatgtagtcgacgaaatacccattcccgccgagcgtaagaagtcctccttccagaaaatgttcaacaagcttcaacgtgccaaaaccattgctgcaccggaaggctcttcgctgaagagtcttctgacacctttccgacgggaggagtgcaaaatggaagttattcgcgagggatccatcaaaaaacgatcgccggaccccgcgaagcccaagccgtctgaagaaccgaaaaatctgatgcagatcaacctggatcgctcgaagcaaatcaaggaaaagtacacgaaacagaaggcaccgtcgcctcctataccagtggcatcttctacgccgaaagaaaaaacaacccctccatcgttggaacggaagtcttcgttcaaaatccaaactaatgtcgttgaagctcaaaccccgcacaaaccggcgcctgtaccagtagagaggaagcaatcgatcaaaaagcaaagtccacctttggtcaccgagtcatctatgaataaaaaaatatctgaaaaggaagaccaaggtccgtcaaaacctatcccaatggaacgaaagctgtcgatcaagaagcagagcccacccttgagtgcggagagtacaccaaaaccactcgaaagaaattcttccattaagagtcaacaacctacaatcgaacgacgatcttcatttaaactgccagtaccgaaggacattgatcgacagcagagtattcttagtcgagaaccgaagagcaaggatcatgaagttcgcaactttgatgacctgctcgacagtgttgatgcaagagaaatgatcaatttcgatgatttgctgtcttccggagatgaactcgagcagaaacgatccgtcaagtcgaacaacgctgctcttttggaaccggctccaataccagctcctcgtagaagaagtccaagcgtgcaggaagcagccagaaataactcgctgtctgagaaagacttcaagcaaacttcgaaggagttgacggagaaattcttatcgaagacaaaaccaaagccagaggcacttacgaaggtagatccaaaattggaactaatgatgaccacgttgacagaaccggctgaagttttggagcaaacggatttgtctaaggattcaagcctcttgaacgcttcgtcttgcgatctaccagacatagtgaatataaccaagaagcaagctatcgaagcacagccagctttgaagatcttggatcacacagaaaagatcaaacagataacctcgcacatccctcaagagattcaagtttacactctgcatacggaggatcacaaaccggctgaaccgcaaccatcaaccagtggagttaccagtgactatgccagcatcttgaaagacatttcttccggcttgatgggaactgacatagtagagccagtattctacgaaccccctcccacgatcgataggaaacccaaatccgacttcacaacctataaacagatactgcaggacaaagctagagaaccggctgaacacaattcgcagcaaccgcaacgtcctcttcgtaagcccaagccaacagaacgaagtgtttcgccagcggttgccggacgtccattcgataattcgatttgcattgacccctggcgtgcgaagaggtcctcgagtatcgaaaatctagtggttgagcaagtgtttgtcaagaaggacgataaagttgttgacacgttctacatcgttccagagcaacagaaaaagctgaagcgaagatcgaaatctttcgataggttgcaggttcccgggtactcgggtagacgacatagcaaaaagtctttagaagagttgcgcgattttggatttgacattgaacctccgggtacttgcaaaaatcttgtgaaccctcgtttacgacatctgaactttgatgaatcggatgaagatctgtcgagtctaaggaacaaccggagacgagagaaccttaggaaatgtcaatcatctactgatacatctaaactagatgtagaagcgagcagagttgacattgatcgggaatctccgattcctcgtagcacagacttctccaaatgggaagccatcttagatcgtggtattccgtattacaaagagcctccagttcacaagaaagaagatatcaaatcattggagaggaagctggaagatttgaaaacggagtgcaaaccccgaagaaagatttccgggaaaaccccagccatcccgaaagactacgatccggaagaatacgttccaagaatcaatcgtagagctttggatacgtatgatgttcctgattctgaccttccaaagtggtatgatccggatgaatatgttccaagagcccaacgtaaccatgcttttgatcatgaaatccctgtcagcagtgcagtcagatctcgtcgtttgaatgagtttgatattcctaccagtagcacctcgcgtcctcaaagatcatctgcctacgaaatagacgtaccgatcagtcgaacaggcggaagatactatcccgaacctttgcatctggatgatcttccaatgacacatactttacccaaatcaaagatcacttcatcacacgtgccttacacttcaagtaggacctatgacttgccaagcagggatgtccctagaactagatattcccatcgccccactgctgacagtggtaccatcgtaaatcgcagccaaaggctgcacgagaaggcaaataagtacatccgttcacaagtaaccaaaaatgatcccaatccgtacattcgagagatgttggagaatgaaagcgatgacgatgcatatccaataactacatccacctctcatcgcgtccctattaccacaagttcgttccatccaatttctacctacggtacttccgggtcggctgccatgagccgtatcgctacaaaagccattacccaaccatctcggatgactcactacactcgtaaggacgttccttcttcctcgggtagtggcagtagatcttaccgtagaggaggcggcgatcaccacgatcgccgagacaattgtaccatctcctaa

SEQ ID NO: 377 - DNA, 981 bp, Aedes aegypti
atgttgaactgtgctgatttagtgcaatttgatcaatacagcttacagctgtataactatgctatggtggagcgttttcgaacaaatcagtttttcaactatgggaatatagtgacggatccgagaacgctctcaaggttctttaaaccctcagtgtatgtgaataacccagcagatgttggacccagtgctctgctagccgacgccagcaaactttcttcagcgccaaagccacaatacagctatattggactgattgcgatagcgatcctcacctcgccggagaagaaactcgtgctatccgacatttatcagcacattctggacaactacagttacttccgcagccgcggtccaggatggcgaaactcaatccgacacaatctatctctgaacgattgtttcatcaaagctggacgttcggctcacggcaaaggtcactactgggccgtccatccggcaaacgtggatgacttcatgaaaggggacttccgacggagaaaagctcaacgcaaggtccgtcgccacatgggcctcacttcggacgacgacatcttcgataacagctctccaaggcagttcttcccggcgattcctgcttcacccatcatgaaccctgccgcatacatgccaacggcgactgaacccctaagccgagcggctgtggctgcagcggcagcttgcaactacccgaccaccatggaacagcagcatgcaatcatcaaaggcgccatggagagtttctcccggaagcgacaattcgacgtagaatccctcctaaaaccggacgacgccaactcttcatccagcctgcaagaacccccagagaagaaaagcaggcatctacatacgccaacttcgatgccggaaggtccagcactcgtactgccaccgctaggtcatcacccgcatccgttggccgcgttcggaagcctagcagtggccggcctgggacctaagatactaccgaagccgacctag

SEQ ID NO: 378 - DNA, 2228 bp, Aedes aegypti
ctcttgcaatgtgattgttcactaacacatgttagtgaaaacttgatgtttctttacagagacatctatccaacatgtatcaaattaaattagtctctctcacttccttcattcgtaaacaaaatagtattgatctcaaaagagttgtatacatgttttcaacatttcataattaaaagctactaaaatggataatcttaatcagcctatgaacatcaccgagtacaacaccctaatcacgaacattatcgaatccgccgtcgacgagctgatccagaagcgcgaaagtggcaaggaatcgctcctgttgcacctctgtcggctgtgcgcccgggaggaacccctgctcctggacctgtccgagctgcatctggacctgatcaacgagctggccatcagcggaatcgatgccagcgccgggtgcaccaaaatctgctcatcctgtgccgagttcttggggcggatccgcgagttccgctgccggtgcgaggacggccagaaaaagatcagctcgctgctggccgaacggagcgtgattccggacttcttgaacttggacttcatcaagtcggaggaacactacggggggttcagtccgccgggtcacccggcggtagatgaccatttcgccgaagcggatgattccaagattgaccaggatgacgacgatgaatcctcggaggaccatttcgaagaggaaaaacccgcgaaggagtcgaaacgagttcaccgaggtactcaacccaagaattcgaaggcatcctcctctacgaacgattctcggcggcgagttgtcaacgggaagctccagtgggtttgtctggactgcgagcaaacgttcgaaagctgtactaagctgaagaagcatcggcagacctgcgagatggtcggaaacgaaaactccaaacggaggggaccgttcacttgtgatatctgcggacaatcgttgccaacgttgatgggcctcagagtccacgtgcacaagcataccaaaagtggcgcggaacaggagcagaaaccgaccaaaacagcggcgggcagtccaccggctaagctggccatttgtcacgtttgcgggaagtcgttcagcagcacgagcactctgcggtcgcatctgattttccaccggcaggagaagcgactcgagtgccagatttgcaacaagaagttccataagctgtaccgcctcaaggatcacctcaattgccatgcgaacgtccgacgctatagctgcgacatctgcggtaaggcgttcttcaccaaggccattctgtacaaacacactcggtcgcacgatcaaaacttccggaagcacccctgcaccatgtgcccgatgctgttcgcccatccctaccagctgcgatcgcacatgatggtccacaccgcagaatatccgcacgggtgcaaattgtgttccagtaagttccgcttcacgtgggacctgaagaagcactacgccaaagcacatcctccgctaccggaggaagacactccggaaccgatccacgtagtcgaacatcaaccactccctctgcatcaccctccactagatgaggtgctcccggaatcgcttattcctccggtggaaccactactttcgtcgctaccaccactgccggatccggcagtggaagcagataccctccttaaagaaggccaacacgacgatctgtccgtcatgctagcgcacattccaccccaccagcaaccagaactgacgccatcggtggccgccgttcaaccggtggtgactgagcatcccttcggagccgaacacctgcttgacgaagcatcgcgggattttacgaccgattgcttcccggcggatcatttggacgggagccatccgacggccgatgacgatttctatacttttatggaatgttaaggggatagttagtaatgtcgaaagaaaaatgtgatataaaataaacaggcgatctaattttaccacacaattgagtttgtttaaaacttgacgttttgtgttctttgtctcattcaggtgttcaatgtagtcatgtttctacctttcgacgacgtttagtattagtctagcatggtgatttcaatacggagttgaaaggcttttacattatgtagtgctagattgttttcttctttttgccagatgttacgtctcaaccgagacagagtctttttatcagcatcttgttctgtgattacttccacagatattaactctctaacacccaaatttttatttt

SEQ ID NO: 379 - DNA, 7947 bp, Aedes aegypti
tggaaatgctgcttcgctcttgtggtggcgggcgggctcccgctagatgtacacaggacggaagttcatctcctggaattgagagcgagagtacgtcgttcggggtgggaaaagtgaaaaaatagccttaaagatgaaaagtttcatcttgacgagtttttcgtcggtttaaagttgcaatttttactgggaaaagtttgactttaatggttgaaaagttttccaaaacagaacggacccgggctcggaacaggattaggtgaaatcgagcatggtcgatcgtcgggaatagtggaaattttggttgaaggctggcgaaaagtgtgaattctgtgtgtgatcgggctaggatttttcctcccaaaaattgcaagagtgggctccatcatcgtcggttgggcagccgtcgacatcgcggggctggtattcagcctccaggatttttttgtgctgctgctccgctgtgtggtgataaaagttagacattttatttgattgggatgtgaaagtgaatgtgagagtgaaataatgggaactgcgaaaaaaggatatctgatgcagtctgccagaatgatggcagcgcgagcgccctcctaagggggttgggatgtgaaaatttctgcttaaagtggtcggaaaaatggtgattattttctgcgaaatattgattgaatgaaactaagggcagggatgcgtgatacgatgccaaaggtgttggacagtgatacggaatcggagataccagtcagtattcagagtaacaacaatagcgagccgaatacggataatgaggaaaaaccggaaacggacgcccttcctgttggaaggacgtcactcccatcagcagtggaaaatggaaacatcagcgatacggatagcatctgcagcaatcagagcaatacgcgaacgttgcccaacggaaattcttcccaaacctccggaccaagtcttccaccagtcagaccaccaagcccgccatcagctaccgccaatggtaatagctcttccagctgtgcatccaacaatccgaacaactgtggcaactctagctccggaagcactagcagtatcaccaatccgaatctcaaccgtgccgcggcgggaactcctgtggcaggagctgctgatcgggtgaggaagtaccgacaccagaacttcagcaagaacatctacatcggcacgaagaatgcggagaaatgggacaccttgcggaatctgttgcagttcaagaacgatgtggaatttgtaacattcctgcttcggctggcggaggtggacgatcgaaagcggaaaaatcgaatagccaatggattgaatggtgactcagattcgctgcaagatgtcctgccgggcgtcctggtcagtagtaaaagcgaccaatcgaatggaaaacctagcactaagaaaaccaaaagagtacaattccaggaaagtgtaaatataatcaacgacaacaatagcagtagcagcatgcgtacctctggaggtggggcagggatattcgacttccacgaagacgaggatgacaatgaaaacggaccaggggtggagtttcgacgcagacgtccaaggtctcagcagccattgagatcacccttaccgcctagcgaggatggccacagggatgaggatgctgcagccgatggaggcgatgaagacgaagaacagtttattgttcaaaatattatcaaaaagattccgggaagggtcggccagggtggcaacgaagttcaacaggactccattagcagtacaatgggatcggtgtcggaagattctttacataccgaaacagaagtgttggactaccgcattgcggagaaaattaaaacggaaatggaggagaagcaaaagctcgaacgaaagtcgttcggggaggacataccgtcgacttcgaacttttctgagcactctgatcgtccttcggacgacgaagcgtacgatagtaaactggacatcaaaaagatcgatatacgaaaagtgccgttcgatccgaagcttggaacgagtagaaaaatgaaacgggaaacgggttcggttgatcttcgtatagaatacgaagagcaagaatatcgaccgatgactccagaagatcgcaagcctctgctaccaccgcccaaaaagcctaggaaagcaccaacaacgaaaaataaagcctgtacaggatgcggtttgaaacacgggaccgatccatgtccactgaacacgccgttggcagtgataaacaataaaatcgagcttaatgaatggattgaacaaaatgaagaccttattaaaaagcataaaattgtgctgaaacccgagaatccagaagagatggacgatgagaacgaagacaactacgatgacgatgaggatgatgacgaaggtgatgagaatgaggaaaatcagtttgaagaaaaactcgatataattccttcatttgcggaaacctcacttccatcggaattcgaacttcgactagcaccgttggcaacgacgatcagcacagttacaactgccaacagtacaaacactagtcaacaaatgcagattgatgcaaatgagtcatcatgctccttggcagcatcccaatctggcgagcaacagcctcaacagcttcctccaccaacggcaacagttaccaatacgatcaaccatggactgagcatttacacgaagattttcattccgaaatacacccaacttggacctgtaatagggctcgtggccaaagagacggaaatccaggacgactgcaacatgcggtatatctacgaaatattcgatgggacaaagtccacctacatcaacatggagaataagaaccaggccaactggttacggtatctgcgaccggctcggcaccgggatcagaagaattgcgtgctgaaagtgcgcaacgagcagattgtgttcataacttgcatggatcttgaagtcggtagtgaactgctgtactggagcgaggagagcaattcggcttggggcaagaagaaaatggaaaaaacgaattgtggtggatgcaacttgaaatttgatcatcccctctattaccgaacgcattgttcagtgttccatgatccagcgttcagtttgaccattcgaaagtaccattgtaaagtgtgcggaattgcagtgctgggaaaggagaacattatgaaacatgcagaaaagatgcatgatggaaaaggagcttatcagtgccagttttgctcgaagttcttcctacgtctgaactatctggagatgcatcgaacctatggctgcagtatgaatcctcagcgagcgcgtcccttgtgcgacttctgcggccgaaagttctgccaaccgcagaagctgaaagttcacatcaaacgcatgcacagcgacatggccgaagtgttgcgagatttccagtgcaagctatgctcaaaactactaggttcccgtgcagccctgcagcgtcactccaaggaagtacacagccgcaactctgctgtagtcagttgcccacggtgtcagaaactgttccagaacagaagcaacctgaagatccacatgttgacgcactccggagtgaggcctttcaagtgtgccgagaacgagtgtgcggcagcgtttacaacgaagcagtgtctccagttccactacaagaaggtgcatggatacacacaggagcagatgccgaagatcgagcgcagtgttgcgtacacatttgatgcttattcgggtgatcttcttacagatggccttcagcgcagacagcgtaggaagctggaaccgggcgaagaaggaagcagcgagaagcgaaaacgagtaccgaaggatcttcctggcagcattctcaaaacgaagaacatcttggagtcgtttagtgaaatttgcaaaaacgacagcaacttgtcgttgttgtcgacaaaaatatcctcgattctaagtggaaatctcaaggactttggaaaggttcctacgggattgccggggatggatggcgatggggttcgaaaggaagaactggatgatgacctggattcaaatgattgtgccgagcgtgacgaacgtttggaggcgatccagcgacatctgaatcagcccttgtcggatgaaaaacatgaagagttcagtcaactacactcgcgtctatcgaacatatcagcccagaacgaacagaatgcaatgcactacaaactgcccagctgtgaggacgagaaaccaatgacggacggagatggtttcggggatttgaattcactaacgtcaagtaatcaaaagtataaagaatttatgaacggcggtaatccgggattggtaataagtaagggtagcaaaaagtggataagtgacaacggtcatatgcaagatgataacaattcggagaacatgctggcggcagctgcaaatagagatttcttaacgaaactgattatgaatggaggaaatgtagggcataacacatcgcatactcaggtggcagatgatgacgaagatgacgatgataactcaactattttggacgttgttgactcgaacaaccaaaaccaacagaactccaatgtacaaaatcagcaacaatctcagcaacaacaacaacagcagcaacaacagtctcagtatacgtcaagctttgctggattaaacaactccttaccggatttgccagcattccaaaaccacactttcccaacgcatttcaatcatcaatcgttactgggaagtttctataataacaacggtggagtaacgggccgtaacgctatcaatacgatacctacatctgctagcatgctggtagaagcagctttgaactcggtgagtaacatcatcaacgaagctgaaatgaacaatagtagcaacgaaaaccaaaatcttcacatggacatcgatggaaacaatacagcatccgctgagaacaacttgcaagcgaattccttcagtacggaagaaatgaactcttcggtagatgaaatgaaaatgatgaagccgcacggtttccctttgccgatgaactcaatgtctcagttttcgacgcagtctccagacgatgctagtatcatacaggagcgcaacgaactagaggtgcggcctaagtcgcgggacaagttaacgaactatggcgatggagagatgcttggttacgatgatcaacctcaccagcaacagcaatcgcagtcagcactacacaagcatactccaagcgtagactcggtgcgtagtgcattgtctcctgatcaaaatgacttcaactattccaactcaaatggagcgcaaaggcagcagcaacaagctcagcaaactgctacaaactctccagcacgatctgtttcacgacaaatctatggagaacatgaccttatctcacccgcttctactccttcattaccgagatacgattttggtgcggataacaatagttacgctcgtcgacaggagaagaccatcagctcattggcattggagaactttgaagcaaatctgaagaaccagcaccatatgcaacacttatctagtgatgaggatagcagtattgtgattgctgagaatttgtccgtcagcgcgagtagcaacgaaccgaaactgaagatcacaaatccaacttccggtggagactttatcacgccgaatgccggcagcggaagtaataaatatgaatcggttcggaacagtttagggtcggatttgtcgacggatctcagactgaaatacaactctgaagccaatgtggatcttccagattttcgtgccagcaacgccatgaatgaaacatcggacttccaaggattagatatgacttctcgaaccggtctttcttcgagttactcacatagcaatttccaggttccctcaagtggtggaaatctgaatttcaaccggtatcaccaccacatctacgacattctcaacgaacgagagcagcaccagcaacaacagcagcaacagcaacagcaccaacaacagcaacaggaattccaactgcaacaacaacagcagcagcaacaaatgcagcatatgctccaagaccatatcggtcaagacgctgagtcggaacaaccagcttctgttgatctaagtcgtacatccaattacctagtcccatctcctccttctcctgccattccttactctcatccccatcctgatatgatacgaatggtttcactggatctcagtgcgaatagtggaggcaacatgatcgtaggcaacacccctcatcatgtccgtcatccatcgtttttgtcttctcaaatacagcattctaaccgcgactcacttcccgatcatcatcggctgttggctagtgaacagctggccgcaacaaaccatcgcctgttagtcgatccggctgcgcacttgatcttcgaacagaacaatcgtcttctcgcggaaactccaggacctgcgcctcctcctccaaggcacgtggtctctcctcaacgaggttttggagcctaccatcatcaccatcaccaccaagtcggatcgtctaactatcatcatcattcggtcaaacagaatctcacatctcctcccttgaatcaacacgcttcagcggcagcgaattaccatcccttcccaacctactactaagcctagagagtcacatgaaattcaccctcaagacaaaccagcagaacgtgccggtcaaactaacgaatattatctgagaaaagtacccaccaaaacctgtaatgagaattgtaaaatgataaccgagaacgagtttcggtatacgaaaaaccacattgttgaatgtctctatcgattatgaatatttgtaagaatatcaaaatatgttctgcagcgcatggggcttatcactatttatatcggcgagtgagctgcatgagctatattttaattgttttaactgtgcaatcaattgtatttttgtaattgtaacaatcaataacaattctactttaattcgttactgtatctatctttaacgcataaaaatcaatcaaaactcttacaaagtcgatttcgcgcaaactatttttccgtaactgtcgcataacaaaacattataaatgtttttcgtctttttttgttttctctctagcacgaattgagaagcaggatgctttccaacagctggaaaaatcataacgtagtttgtaatatttattatgaataaattagacagagtaaaaaatactatcttaccaagatataccaaaccatacacatacaaacgaatcgagagcattgtgccaaaataacaaagaaattcatatgacagtacgcaaagagtgttcgtttatttgtttctagtcaaccaaaatcatcagtcttgtcagtcagtcattttattagtagttgtaaaatcgatattaatgaaatagattgtaacaaaaaagaaagccatcgtatgtatctgtgtaatggaaaccacaatatacaatgaaaagtgttctatgtgacaatggcacaaaccacaaacagcaaaacagacaaattatacccaaaatacttattaatacgaaatgacatcacaaaatcgaaaattaaaatcataaactccttataaactgtttcaacgaggcacttgctagctcacattctgaccaatagtgacgacgcattaaccattaacaaatgaatagtaaacgtctaatggtttacgttaagtcagcagtactcagaaatcgtcgtctagcgcgacgatgaggacgaatgtcgatagaacacaacaaggactttacgcaacttaccaacctagagagaagataacccaatattatctctgaagcaaacatagattcaagatgcaaattatgacacaaccacatctggcatatgtatgatacgaggaaattaataaagaaagtggataaaatataaaaagtgagtttcttttttcatataaattccatctcgaaaatctcgaaaaaaaaattctgagcgtcagaacttgtgaacttttttttcctctatgaatctccggtataatgattgaaatcattgttttcgaaaagttaaaaaaaa

SEQ ID NO: 380 - DNA, 3509 bp, Aedes aegypti
cccaaaataaaataaactaaaaaaaattgagattgttgcaactgttatatcttatctatcgggactccgtatcaattattcacccattctgaaaacatatgccaaagacccggtgcgtacgaacgaaaggcgattgcctgtgttggtaaaactatgttgacttgtcgtcgatcacttcccgcgaccccacacagcagcaacagagaacatgcgccagcagcgccgggtgttttcacgtcccgagcgagcagccgaagcagaaatcataaacatctcatcaccacatcgaacgaactttttgagtcagcgcgaatgaaaccaaacacaaacattcctcggtctgtgcctgtggccagagcaggcccgatctattcccgtacgcgctttggatgtttgcgtgagctttccgcttcgcccgttcgggtgggttttatgttgcatatgttgcaccggacagcttacgttcacccatcggatcgggtggtaaggccgatgcgaatcagttgctgccaactcgttcgtcagcaaggacgttcattcacagaacaacaacagaacggagagagagtgtgctgaagatagaagttcttatagtttttttgaaagttattaacaaggttttagatttttttcgtaattatcttcattgagaggaaggattgtgtaacgtgatcgcttcgggtccccgataatcgccttgagcgctgtgtatcaacgtgtgtgatctttgagagattgaagagatcggtcggtgaggatcccgatcggaaattggatatcaagtgtcatacagttttgttggaagtttttacggttcaactagaaccggcagctgcagaggaagcaagtgaagcactatactcgatcaatacattttttatagtggctcgttgtgaatgaattagaaaggagcaagtttgtgtttttttttttggtgagaagagaaaaaggaagattcgcttccggtgcgaagattttttccagtgaagaggaatcaagtgatcagttcgtcaaactggaaccagccgtttccgatggtagtttaggaggaagttttggtatcaaatcggcacaccagtcttgcgtcaccatggttcgatcgttgtcacagtggaccaaaacgctcagctttccggcccggatttccccgaatcggaactcgaaagagtgcagcgtaaacgtgctgccaattacaccgcctccggcaccgccgaggaacaagtcgaccacttcgacgacctcgtcggcatcgtcgtcgacttcggcgctgtcccattcgtcggctacttcgtcgccttcaccgccaccgaacgttccgatcacggaaatcagccaaattatctacccggacccggaatcggagaaggccatcatgggatcgctggtgttctgcatccatcacaagcagggctgcaaatggtccgacgaactccgcaaactaaaggctcacctgaacacctgtaagcacgatgccatccagtgccccaacaagtgcggttcgcaaatcccgcgggtaatgatgaccgatcatctggccttcacctgcattctgcgtcgtgccatctgcgagttttgcaatgtggaattcaccgggatcggtctcgaggagcacgcgggaacctgcagttccgaaccgatctactgtgaatccaagtgcggaacacgtgtcgttcgtggccgcatgtccatccaccgtgccaaagattgtgccaagcgattgcggagatgtccgcactgcagtcgggagttcagcgctgatacgctatccgctcacggagccacgtgtccaagaagcccagtgccatgtccccagcgttgcgatgcaggtccatttgcaagggctgacctcgaaggtcacctacgtgacgaatgcaaagcgctttcagtaccttgtaccttcaaagaagccggctgccggttcaaagggccacgccatctattagaagctcacctcgagtccaacacttcctctcatctgtcgctaatggttgccctttccggccgacaggggcaacaaatcaacatgctcaaaaatgctatggccaaactcagtaccaactacaccggcacgctcctgtggaaaatcaccgactggtcagctaaaatggtcgaagccaaaagcaaggacgggctcgagctggtttcaccacccttctacaccagtcagtacggttacaaactacaagcatccatgtttctcaatggcaacggacctggcgaaggaacgcatgtctccgtctacataaaggtccttcccggcgaatatgacgctctgctgaaatggccattctcccactcagttaccttcaccctgttcgagcaaggaaccctcggcagccaaggaggagtcgcagaatcattcgtaccggatccttcgtgggaaaacttccaacgcccgtccaccgaaccggatgccctaggatttggattcccacggttcgtatcccacgagctcctcaaccgcaggccatttgttcgcgaagacaccgtcttcctgcgcgtcaaagtggatcccagcaagatcgtcgccgtatgaaacaacaaaacaaataaaagactcctagcttgtaagcgttatacccacgattacccacaacgagagaacaatgaactgcatttatactatgattcgcattctgtacatatagacgagcgaaactagcatatactgatagcgtagcgttaggcaagcgattgttagaggggatcccttgaaccacctgtacatagaacatgaaattcgaattcagggtcaaccctcggcaacaccaaaactctgtataagcacatccgagcgatgaacgccacaacgaaacgaatcagcttgacaatctcaattttctaagttaggattttgttattgtatcgtaaaagaacaaacctttctagcgtaacgttctaaaggcattacaacctataactgtttgtaatattccacttccctacgaacgtgtatcaaaggacggaaaagaagtaatactactgctggaatcatgccaaagttttgtttggatggctttgcgcgacctgatccggaatcgtgttttcttccggacaggcaaagcttacatcataatcaaaaataattttccctgtctttcttcaactttctcttctcatctgtcaaagtttttagttctaataaaaattttcccagactgtctaattttactttttaattcagggttattattttgttggttgtacgtaaaggtcaaaaggagtaatcaaacatttttctctattagataagtatttcgagtcattaggatatagtgattaattgttgaatatcgattcttggatttaaactcgctgcacagtacacgcatgatgttattcatgcatgcggttttggcgagatcatagctagggaaccatttcaacacaaatgtagtccataagtcgtatttaaccatggctagtttttaaggaattacacacaaaacgtagtgataagtttcgcaattgaacgaaaatacaaatcaaaacgaatcaaataatgcaaa

SEQ ID NO: 381 - DNA, 2443 bp, Aedes aegypti
aatcgtgtgcagaaaaagaagaaagtaaatgattggaagagtgcccagatgtgaggtgctgtgccaaataatgtgccgggcagagtgagcagagtttcgcacccccttgggttaatccaacattcaagttgatgtatttacaatattttatataattttgtccagtttctaaatgtcttgtccgcactgtgccccggtttccgatgaactgaatgaacgtcccagagaatgaaccttctctcgcaggattttgacgtctacgtccttgaacaaaaactagcattttttttctagtgttaaatcgaaagtcgtcggcggcggcggcaactcgcgagcggatgcagttctagtgtagtgaccgtcgcgttccgtcgtgtgtgaatagatgataatgcatcatcagctgacccaacaagttttgatccagtatcgtacatagggactcctgcatacatctaacgatctgctgctgctgctgttgcattcccgcgtttcgttccggagatatctaggacaccaaggatgactaaagattcacaaataagcagctgcgatcgctgcccaaggctggtcgcgttcggaaatgtgctgctggacatcagcgtcgagctgcacgacaacaaaatcctcaaggagttcgacctgaaggaagatgaccagcgggaaattccggcggacaagttggcccggttgggggccgttgccgtggagacatgcggtaaaccgaaatacaatcctggcgggtctgcactgaacacgtgccgaattttgcgcgcacttggcgagaagaatgtgatgttttgcggtgccattggcgttgacgagaatggagaggttcttacgcagatactgaaggatagctcgttagccacgtgcatccaaaccttgccggagcactcgacgggcacttgcatctgccttatcagcggagataagcgcagcctcaacgcaaacatcggggcgtcgttgcacttcaagaaggaattcgttatgtcacgttggtgccagagcaagatcggaagctgcaattcagctgctcataccgacagcgatgaggaaattcgtatcttctacgttgagggatattttgtgccggaaaagtttgccatatgcaagtacatctacgaaaagtactgcaagggaacgccaaatctgttcgtaacgaacctcaatgccagctacatactgcagaacttcaccaaagaaatgcaacacctggtcgagcaggccgatttggtatttggcaatctgaccgagttcatctcgttggccgaaatctatgaatgccccaccgtagatgatctggccaggtgtctgattaggaagtacttaaaaatcaatcgggagaaaatcctggttgcgaccgatggttcccgaagtgtgcggttctaccacggcaacggcagtgcattctatgctgaatcctatcaggttccgattattcccaaaaaagcagtcatcgatacgaccggtgctggggactcgttcgttgccgggttcctgtacaagtacatgaatggtgaatgccccacgctgttggactgcgttcgatatggcagcaaggtggccgccaaagtcattcgtcaagtaggatgtaatctaccctcctctctacctacttctccggttagcgggctggttacacccgttgatgaggttgaatccaaacttgcctagaacagaaccattgcgagccatatccttaaatgtacatccttagtaacttattagcccggtacaggtgtacttagcgcttattacttagtccccttagaacaaactaatggtgttctgtttcttaatctcaaaattttggtctataagaaggtagtgtgatctcattttatttcgtgtttagttttagtgcttaagaatagcatcgattgtacgctgactatacaaaggcaaagaaagtatacatttctaggtgctagttttgaatctctaatgatacctattttaatgatgtttcgttatatacgttcacaagccacaaataatgcaatcgctgaaaaacaagccacatttgttacataaggtcattaaaatatatattcaaaactgttgattacatggtacatatcagatgaacacagacaaacgaacgtaacatttcgaatcatttcagcaacgagatcagcattttgaaaacattttcgccatatgattgctgaaacacttcaaactcagaacctgcgtgcatccttgagtaacaaaataggactgcttgggcacctacatgaggggattttctcggtcaaattattaaaaactctatagtaaaataaacttcaatatgaagcacatataggcttattctaagagtgaggtgagctgagagctctaggtcttgtatagcgaggtgacaatactccactcgaatgaggtgagatctcatttaatttacacggcgaatcacttcattcgagtcgagtattgtcac

SEQ ID NO: 382 - DNA, 2036 bp, Aedes aegypti
aaacaagaaattcacaacaagaatccgctgcagcgtcgaaaaatcattgtcctttcctttcggttcattccgtttcctttataagcaccatgatttgcagcactgtcacctcacaggaaaccatctgcagtaacatcgcaagcctatgccgagtttgttccgctcccggatcgcacagcattttccaaagaattccagcctacctgcatgaacatcctcgggagtgcgcccggtggccgttccagattcacaggctcatcacggaagtgacggggttggagattacccaggatgatgggcttccacagaacatttgcgtcctctgcatttcgtacctgaaacacgcctacacattccgaaggcagacaatcgacaacgttgcagccttgctggcagccaagtatctgattggggtgcaggaacaaaggaaggattccaaagacgcgatggagatcattccaacgatgccaagcccaacggttattcgggctaacgttaacgaaattagctacaaaatgatgaaccctggaggaagaggacgaaaggctggaatccctttccagaagaatttggacaaggaagtgcttcagcaggtgctgggtgggaacgttcaacagaagaagaaacagaataacgctgaagaggagcagaggcgaattgaggaagcgttgctcagcaggtggcaagattcgtccccggaggagaatggaacggaagacgcgaggggattcttcagttatacggagaaggaatttcaggaagatgatatcatggaactggacgatcttaaggagcacaacataacgtttaatctaccggaagattataaggaaaagaagtgtccctcttgccggagacgattcatgttcgaggaatcgtacaacgaacatctcaaagaatgtcttctgttcaagttggttaagttcataagggaagtgtatcatttcctgtttctaaaggagaaccgatctatctcttcgtttgagttcatccggagggtagtgttctccgtgaagaaaaccgttgaaataatttcttgctacggcgagcaaagtatcgaaccggaactggaagctgtagagagttggagtgcgaaaactgccgacgaggagtcaatcaaaatcgaacaatctttcctgagcaatttggagaagcttcgactgagcttcaaccccgagggatccaaaatcgtttcaccttctgtgttgcaccgtcaagttgatgatggccgaagctcattcaccaccggatcaacttccatctcccctcttgtagcgattacccggtgcgaagaatgccacgtgacattcgaatccgtcaccgaactggaagcgcacaatctaaactaccatcgagctccactcgttgtcaccaccccgaataatctcaaaacgcccgcacgattccctccagctccaattgcaccatctcccaaaggggtggacatgatcaaaaacacactcctctcacagaccccagattcgtcgagcggaggccctggcgaaggaagcagcagcgatgatcaacgcaagacggtcagttgcaaaaaatgccagcagcgcttctacacaatcacccagctggaccaccaccagattcgcttctgtcagcagaagttggacagcccagcggaacggaaccggaagaatctgaacgccagctacttctacacaatggaactgctcaaagatgtgaagtagtctccctccaaaaggctgggtacttcgcttttatcacatttgacgacttaacgttagctgtattagtgtgtatttgatactcttttttataactgtaagcgtattggtccaactctaaatttgatcgtttttgatgttgaacactttacactcgtgcgagaaatgcgtttcaacgcattctgtcctattttgatgaattgtaaaaccttttttttttcttttgtttctcgcttaaaaagcaacagtatttagtttttaaatttttaagtaaatgactagattctcatggtttaagcacgaatattcccactgataaattgaaatttgatgcaacgt

SEQ ID NO: 383 - DNA, 1797 bp, Aedes aegypti
ttgcagatctcggaatgtacggcgaaaggtggagagtgcgatgagagcaaaggtcgacctgtatgcgggacggataatcagacgtatccgacgcgatgccatctgataagggcgcagtgcagcggtcatcaggtcagcctcaaacatcgggggacttgtaaagacgtctgtcacgcatcacgcacgtacgccctccagcaccggtccagttcgccctacggggtcaaatttgtgccacgctgccgggaggatggaacctacgctccggtgcagtgcctggaaagtgtcggctgctggtgcgtcaacggccaaggcaaaccactgcccaatacgacggttcagcatgggaaaccggtttgcgtcaagaagggcaaatcaaaccagcggcgatcctcgccacgaaatccgggagatttagattatgattttgtgcctttccacactcatcctttcaccggttttatttgtggaacaggttgctctcgtatggaccgagccgtgttcaaccgtaatctgttgaagcttttcgagaacgaacacattcgattaacggcggcctcggtcagcgagaaaaccgtcctggattggaagttcgcttcgatcgatggcaaccggaatggcgtcctggacaagaccgagtaccgagagttgaagcgactgatcaagaaggtcgtgaaaccgaagcgctgcggtaggtcttttggtaagagctgcgatgccgatcaggacgagcggctatcgcggttggaatgggccaactgcttctccaaggataacctaacacgtaagtatacgttggcccctcaacaccaccaccagcagcagcaataccaacaccaacatcatcacatgggtggcgtaggcggcggcggcggcaacggtggtggtacattaatcggtgtcggtggctcctcccattcttcctctagctctggttctagcactagcttcctccggtacgatgagtcacagcagaatggctccaatgattacactgattttgacgatgaagatgattactcagaaaatgacgacgattcggacgaattgcccgatagtaaaacaacgctggagctgaaaggtgaccaggatcccatcttcaaagacagcgaggccgaatcggactgcctgagtgatcgtgccgccgcactggaggagcaaaggagtggtgctacggcgctatacgttccggaatgtaccgccgacgggcggtatcaacgggtccagtgctacttgtcgaccgggtactgttggtgcgtccacgaagacaccggaaagaacattcccgggacgtcaactaaggacaagcgaccgcagtgtgacgtgtatccgggcgtagggggtcgacagatgcagggctgccccgatgacaagaagttggagttcttgcgagacttgaaggactttttgaaacagcaaatagcaagcaactcggtgacggcagcggataacaccaaatggggaaccgaagacgagaagattgcaacgctcagctttgtactgctagacaagaacaagaacaaggtttgggagcggaaggagtggaaaattttccgagagcttgtcactgaaacaagacaattgcgaaaatgtggcaaaaagatgcctcgctattgtgacgtaaataatgatcgcaagatcaccctctccgaatggctcaattgtttgcaaacccagcggacaccctatgtagaagggggctcggtagccaatggttggaaaccatccttgtccgcatcatccacctccaagttccggggccctaaccctctggaatcggttctgaaaagcgactga

SEQ ID NO: 384 - DNA, 3067 bp, Aedes aegypti
cactcaggaagtaaaccgaaatgaaagtcttccataaatacaccttatgaaacacaatccacatcagtagtagattgccaccgtcgtcgtcgtcgattgctttccgtcttcagaggggctgcatgctgtttcaaagttgagctccttcgtgagtgatcaacccccacttcatcgaccacttcgcgtgtgtttgaaattcgacgagtgcgcgcgcgagagagagagagtgagtttcccacgcggggggagagtgagtgacttgtacgcgggggaccccccagaggaggcactcgcgtggtcccgccacggcaaaacgcgtacgcctatatataaatagttgatggtctggtcggaaagattttagtgcgctgttggacattcgagcccgtctccggctccctgaaccgtgtctgtgtggagaattctagtttttttgttgctgatttgactggcccccgctaggtggctggtgggcgcgcgtagaaaggagatcctgtgcggcggcgcgcagcggtggtagaggagagcgagcgagccctacggaaagggagagagcgaaaggtgtgggggttgaacagcacacgcaattcgtgcggtgtgaagttcgagcgatcagttcagtgcgaagagtggcacagtgcagttgtgcaagccttgaaatggcgagagtgataaagttgctcgcagttctgtgcttagtggtggcaatcgctgaagccgatttccgtgtcaagcgtcaggatgaggatgccgaccaggaggacaacatcgacgagctgtgcaaggaccggccagccgacgaatacttccgtctgagcaccgatggcgattgccgtgaagtcgtgaggtgtgataatgctggggaaaatggcatcacaagactggcacgcgtgcgttgcccaaccgggttgtactttgacgtttaccgtcagacctgcgattggaaaacgaacgttaaaaattgcgatgaactaggaaagccaagaaaggttcttcccatcctgaagaccgatgagccaatctgtccggagggtaagctctcttgcggtaatggcgaatgcgttgacaaggaattgttctgtaacggcaagcccgattgcaaggatgagtccgacgagaacgcgtgtaccgttgagcttgacccgaaccgtgctcccgactgtgacaccactcagtgcgtcctgccggattgtttctgttccgctgacggtacccgtattcctggaaacatcgaacctcagcaggtgcctcagatgatcaccatcacctttaacggtgccatcaacgtcgacaacattgacctgtacgaggacatcttcaacggtcaacggcagaacccgaacggttgccagatccgtggtacctacttcgtgtcgcacaaatacaccaactactcggctgtgcaggacttgcaccgcaagggccatgaaatttcggtcttctcgctgacacacaaggacgatcctaactactggacccagggaacatacgacgattggctggctgaaatggccggagctcgtctgatcatcgaacgttttgccaacatcactgacggctccatcattggtgtccgtgccccgtatctgcgcgtaggtggtaacaaacaattcgaaatgatggccgaccaattcttcgtgtatgatgcctcgatcactgcttctctcggacgtgtcccaatttggccatacactctgtacttccgtatgccacacaagtgcaacggtaacgctcacaactgtccatcccgtagtcaccctgtctgggaaatggtcatgaacgaactcgatcgtcgtgacgatccaaccttcgacgaatcgcttccaggttgtcacatggttgactcctgttccaacatccagtccggtgaacagttcggtcgccttctgcgtcacaacttcaaccgccactacaataccaaccgtgctcctctgggtctgcacttccacgcctcatggctcaagtccaagaaagaataccgtgaagaactgatcaagttcatcgaagaaatgctcggtcgcaacgatgtcttcttcgtcaccatgctccaagtcattcaatggatgcagaacccaaccgagctgaacgctctgcgagacttccaggagtggaaggaaaagtgtgacgtgaagggacaaccctactgttccctcccgaatgcctgtccgctgaccacccgtgaactgcccggtgagaccctccgtctcttcacttgcatggagtgccccaacaactacccatggatcttggacccaactggagatggcttctctaccaagtaagcaagtctcccgaggggaaactccatccaccgaaagtctgatttagttgcgtgaagagaacactacgaacgtaagaaagaatctccgttgattccccctcaactacccaaatacttcccctatcctcaacggagtatagacatctgttgtaaataattataatttcttacattctcctaaacctccagcagaaatcccatccttacattccttccctgaaatccccgcatcctcaaagaaaaatccgaaccaccattttcctattctcggagaatgatcggaatatgataattaattcaacgaaaaaaaaaacattaaagattgaacgtgataattttatttaaaacaaaaatactctttccaaccactaccatccttgaaaacgaaaagacaaacggcaccgagccggagtgaaagagattttatggcgcgagaaagaaaatggtggccacaccacccattcaagtatagtgtcgcgattttgctgcggacagcccgggtgtgtgcgtcacaaatcaggtgttttttgtcagttaagagtactcgttttttattgaatgaacaaaaaactatattttaaactatttttcctaacttaaattgagtaaaaaggattgtgccgcagccgcaaggtggccagaaaattgaaagccggatttgacgtgactgttgttatccccatttgattgggaagtgtgtgcttgcggctggtagtttagaatgataaaaatgaaaatacaaacaaaaaagatatgaaaataaatttccacaaaaatataagaaaa

SEQ ID NO: 385 - DNA, 1842 bp, Aedes aegypti
ctactaaattttccggaatgtcaaaacttgctcggcattccctcgtaccaccggttgtacgagaaagcatcaagtggcagcggcggcgacggaacctccggtggaggcgcggactttgataatctcctcgagtacggcaactggttcgcgagcagcagtaatgggagccttctggagtggaacaatggcaacggttctgccaatggcagctcgctggacggcggcttcgtcgtcaatgggtcgttgctgggcggaggcgagatggacatgggggacggcatcggaccggtgctgccccctttcgaactgtggcagacggttctgatagcgatatgtctggcgatttgcataatactcaccataggtggcaacattctggtgctgttggcgttcatcgtggaccgaagtatccggcagccaagtaactacttcatcgcttcactcgcagccaccgatatgctgataggaaccgtttcgatgccattctacacggtgtacgttctcatgggctactgggatctgggcccgctgctgtgcgatttgtggctgtcggtggattacaccgtctgtttggtgtcgcagtacacggtgcttttgataacgattgatcggttttgctcggtgaagattgcggccaagtatcgaagttggcggacgaagaacaaggtcatctggatggtgacgataacgtggatcattccagctctgctgtttttcatctcgattttcggatgggaacactttgtcggataccgggatctggctcccggcgaatgtacggtgcagtttctgaaggatcctgttttcaatacggctttgattattggatactactggacgacgttggtggtgctgtttgtcttgtatggcgggatttacaaaacggcatacgacatgcagaagaaaagcgaagccaagcagcggaagatgcaatcaatggttgctttggggaatgcgatgactgggaaaagctcaatgcccaagccgaaagacgagaaagtggacgaacagaggaagagtaaggaggagaaagaaggtgacaagagcgagcgatccagtagtcctgcgttcgattcggatgacgaaagctcagcgaatactaaacagcagcaagaggaagcgcgagttgctaagaagcgaacttctttggccggattgctggtgggagcttcagcgactgttctgtcgaatcggtacaacaatggggcagtgaaaacaacgacaactcctaccagtgaacaagccaagccaaagcgatctccaagcaatccagcaaagaacgaaggactgcccaaaataaccgaatcaagcataatggactctgacaataccgatgggaaacctcaggtctccccactgaagccgactccagtgcacccgagccttaattcgagactgcaatcgaacaattctacgccggtttcaagcacaccttcaaatccaaaaccttcaatgtccttggcagtggttgaccaatccacggcaacctccagcaagcgggactttatccgctcgattggaaaaagactgaaaggcaacaaaaagtccggaacgctcggagtcggccggcaaaagtccaaatcggagaaccgagcccgcaaagcgttccggacgatatcgttcatactgggagcgttcgtagcctgctggactccgtaccacgtgctggcactggtcgtcggattctgccggaacccaccctgcatcaacgagcacctgttcatgttttcgtactttctgtgctacgccaacagcccgatgaaccccttctgctacgcgcttgccaaccagcagttcaagaagactttcatgcggattttgaggggtgatctgcacatgact

SEQ ID NO: 386 - DNA, 2955 bp, Aedes aegypti
atgctacaaaacaggaacgcaccactaaatcaagatatcccattttctctgcctctcattccatgttcccgccaattgtcactcacggacaaacgacacccccctcgcaggaagctgaagagaaaacaggaaaagttttgcaagcaactttacaaaagattaaatctactaaattttccggaatgtcaaaacttgctcggcattccctcgtaccaccggttgtacgagaaagcatcaagtggcagcggcagcgacggaacctccggtggaggcgcggactttgataatctcctcgagtacggcaactggttcgcgagcagcagtaatgggagccttctggagtggaacaatggcaacggttctgccaatggcagctcgctggacggcggcttcgtcgtcaatgggtcattgctgggcggaggcgagatggacatgggggacggcatcggaccggtgctgccccctttcgaactgtggcagacggtcctgatagcgatatgtctggcgatttgcataatactcaccataggtggcaacattctggtgctgttggcgttcatcgtggatcggagcatccggcagccaagtaactacttcatcgcttcactcgcagccaccgatatgctgataggaaccgtttcgatgccattctacacggtgtacgttctcatgggctactgggatctgggcccgttgctgtgcgatttgtggctgtcggtggattacaccgtctgtttggtgtcgcagtatacggtgcttttgataacgattgatcggttttgctcggtgaagattgcggccaagtatcgaagttggcggacgaagaacaaggtcatctggatggtgacgataacttggatcattccggctctgctgttttttatctcgattttcggatgggaacactttgtcggataccgggatctggctcccggcgaatgtacggtacagtttctgaaggatcctgttttcaatacggctttgattattggatactactggacgacgttggtggtgctgtttgtcttgtatggcgggatttacaaaacggcatacgacatgcagaagaaaagcgaagccaagcagcggaagatgcaatcgatggttgctttggggaatgcgatgactgggttgacaggtcaagcagcgggtataggaatatctaaaacgcaaagtactttactaagtcaggataaaccattgccactgccaaccactccagcctcgaatatgatgcttcctacgactttggcgttggcctcaaaccaaatacagaaagaggaggcaggttcgagcaggaaaagctcaatgcccaagccgaaagacgagaaggtggacgaacagaggaagagtaaggaggagaaagaaggtgacaagagcgagcgatccagtagtccggcgttcgattcggatgacgaaagctcagcgaatactaaacaccagcaagaggaagcgcgagttgctaagaagcgaacttctttggccggattgctggtgggagcttcagcgactgttctgtcgaatcggtacaacaatggggcagttaaaacaacgacaactcctaccaatgaacaagccaagccaaaacgatctccaagcaatccagcaaagaacgaaggactgcccaaaataaccgagtcaagcataatggactctgacaataccgatgggaaacctcaggtctccccactgaagccgactccagtgcagtcgcccatttcgccggtggacatcgaaccggtggtggtttccaaatcagagcgagctccggagatttcccacacgatcctgacaccaccttatggttttcaaggaagcccacgaacttccgaaagtccaccgtccaagtcagacaggcctcatagtataataagccaaggagactcgaccgtcacgtacgacgccatggtcagcatggatggtgccgatctccgatttatggacgaaagttctgttgtggttccctctccgcagtacgagagccctccatcagcattcgccatcgtacaacctcgctcaccagcacactccgcagcacaaagcatagcgaacccctcgcttctccagaaagcgctcatccgagcaacggcgcagtctcagcaaccaccaccaaccgttctgctgcgtacaatcgacgtaggcccgctctcaccaacgagtcaacagaactcaatacagcccatcaataagtttagtacaacagtcacagtagcctctcaaaatccggacaaaccggtcaccgtgctgaacaactcctacacgaaccactcaactgtagatcaggccttaccgcaaccctcgcagatggacagcccgagccttaattcgagactgcaatcgaacaatcctacgccggtttcaagcacaccttcgaatccaaaaccttcaatgtccttggcagtggttgaccaatccgcggcggccacgtcgacaacgaccagcagcagtacggcagctccagcggtgacttcgccaccacctcaaaccaacgctctacccagcaccacaaccgtgcaaacgcaagtttcttcctccaccacaaacaacactcccagcggagcaacgatcaccattaatccctgcctggaacggcagacctccagcaagcgggactttatccgctcgattggaaaaagactgaaaggcaacaaaaagtctggaacgctcggagtcggccggcaaaagtccaaatcggagaaccgagcccgcaaagcgttccggacgatatcgttcatcctgggagcgttcgtagcctgctggactccgtaccacgtgctggcactggtcgtcggattctgccggaacccaccctgcatcaacgagcacctgttcatgttttcgtactttctgtgctacgccaacagccccatgaaccccttctgctacgcgcttgccaaccagcagttcaagaagactttcatgcggatcttgaggggtgatctgcacatgacttaa

SEQ ID NO: 387 - DNA, 1527 bp, Aedes aegypti
atggaggttttcgtactgttgtttctgctgctgagcgccggttcatcatcaccgatcaaaaattactcatgtgagaaatctcacggaaattgtgttctaaacaatgttatcttggagactgaatccgatctagaacaagttgagtttccggacatcaccgatcctctcacgattgcaacaggaaaaattcctcattttacgcgaatgcttatcgacaaactgccgggcataaaggacttgaccatcaaccgcctggaggtggaaaccgtctacgttaaaccggaaatgacacatctcgaggccgtcgggaatcaaattcgtcttttggaagttgataatgacaaggataaagcctaccaaatgctgacgctagatctgtccagtaataatcttgaagacttaagtgtcctgtccagatttagacaacttcgccggctcacgctgaatggtaacaagttcgacactctgtcaatggatttattcgaaggaatgtccgaattgaggcaactctcgctggataacaacaacatgtacaggtttgacacgagtaaaaaaatacatttgcctaaattgcagaccttttctctagctggcaatggattgatcgagttacacgtcaccatgtgggattttccgtcattgaaagaattggatgtatcaaacaacaaactttactttttagaaggaagtctggatcagttcaaatcactcgaaagtgtcaaaatatccggaaactactggaagtgtgattttgtggacgcgattcttctgaagacaatcaaattagacgaggatgagccaaatcgttgtaaggagagcagtttgatagatgtgcagcgaatttgttgcacttacgatgcgttcagtatcttgagtttcgcaaaggatgatctaggtctgttcgacgataagtgggaggacctgcgcaacctgcaaaaagatttccagggattcaaagacgaaacggaacgtaagctggtgagaataggagaactcggtgaggagcgatcactgatcgagcgcatcgaagagattaagtcaaatcaagagcagatactgaaaaggctggacagttctgctggcatgcttgagatcgaacagttacgctcagacataacagatcataaaagcacaatggatgataaatattcaggtttgggaaggcagctggatagtttcgttgaaccatttaatgaattacgtagcgatgtgaatgagaaacttgccaaatacgaagaaataccggaaaagcttctaccattggaacaactgataaacgatcaaggagcattgcagaaaagcacaattgtattgcaaaaggcggtccaagatatggagaagcagcaattgctgtatcatttatcaatcgctgctctaagaaatcagattggatcgcaagtttcggaattgaaagccgaaattgacaaatttaccaagcgaaatgaaaagctcgacactcaaattgatcgaataatgtttaatgtaaacacgatttttgagatgttggaatccatatccgaagattga

SEQ ID NO: 388 - DNA, 1146 bp, Aedes aegypti
atgcctttcgaagagcatctgagtgacaacttcacggctgtgctacggcccgaggcgcggttatcggccgaaacccgctacctcggctggaacgtggcccccgaagatttgccgcacattcctgagcactggctcaagtatccggaaccggaagcctcgctacactatctgcttggcttgttatacattgctttcaccatcttcgccctagttggaaacggactcgtcatttgggtgttttcctctgctaaatcgttgcgaacaccatccaatgtattcgttgttaatttggcgatttgcgatttcttgatgatggttaaaacacccatcttcatttacaattccttcaccaaaggctttacgacaggcttcctggggtgtcaagttttcgctttcatcggttcactatctggcattggtgctggggcaacgaatgcatgcattgcttacgacagatacaataccatcgcacgacccttcgaaggaaagctcacccacactaaagccatcttcatcacctgcatggtgtggacctacacgttcccttgggctgttttgccgcttatggaactctggggaagattcgttcctgagggatacctaacatcatgcacattcgactacttgaccaacactttcgataatcgcatgtttgttggaacgatcttcacattcagctatgtacttcctatgagcctgattatctactactacagtcagatcgtaagtcatgtcgttaaccacgagaaagcccttcgtgaacaggccaagaaaatgaacgtggattctttgcgctcgaaccaaaaccaagccaacacctcggttgaggtgaggatagccaaagctgctataactgtttgtttcctgtttgttgcttcgtggacaccgtatgcggtactggccttgattggagcttttggtgataaaactttgctgacaccgggcgtaaccatgttcccagcttgtgcatgcaaattcgtcgcctgtctggatccgtacgtgtacgccatcagccatccgagataccgtgtagagttgcaaaagaggctgccttggttagccattacggaatcgttgccatctgattcggcttctaatgtcacagacgcgaccacagctaacacatcggcaccagcatcctcttaa

SEQ ID NO: 389 - DNA, 3321 bp, Aedes aegypti
atggggtgtgcagtgcagcaggagcccgccagtaacgagaaatcctcggcggcggcgctcaagactgagaaaagtctgaaagttccaagcagtcagtgtagtttaaagaatactaatgataggagcaacagtagcggtagcagcagcagcaacagccttaagaaggcccacagtgcactagttaaaattcttgaatccgctcccctgaatagttcaaatttgatcacactgtacaacggaagttccggtggcagtggttctagtagcagtagtaatagtagtagtagtcaaagtaatcaagtagtagctcctaaggaggaaacgaaaatcagtgtgttagcaagtagttccagtcaaacggtggaagatcctcacgcggggaaattgaaaacaaccccgaagatcgatttctgcccgtggaagaagaccacgatcgccaaagagtggattagtgcatgcgaacggggctcgtctgcctcagtagatgataagaatcaacctcagcagcagcagcagcagcaagaagaaggcgtcagccagtgtgccatactagacgaacagtcccacaaacagccaaccggaggatgccggagtcgggagtcctcgcagagttccgatcactcgtccctgtccgcatctccggagcccaccagcgatgacagctgctgcagcaatagttgcagttccaatggaagcagtagcgactgctgttccgactatctgatcaatgatctctgcaagcagttcgaggagaacctatgcgaagatcatggtttcttcaggcgctcgatccagcagaaaattcagtatcgcccttgtactaaaaaccagcagtgtagtatactccgaataaaccgtaatcgctgccagtattgtaggctgaaaaaatgcatcgccgttggaatgagtcgcgacgcggtcagattcggtcgtgtgccaaagcgcgaaaaggcccgcatcctggcggccatgcagcaaagcacgcagaaccgagggaaccagcgggcactggccaccgagctggacgatcagccccgtctgctggcggccgtcctccgagcgcacatggacacgtgtgagttcacgcgtgagaaggtcacttcgatgcggcaacgtgctcgcgactgccctacctactcgatgcctactttggcatgtccactgaacccggcgccggagctacaatcagagcaggagttcagccaacgcttcgcgcatgtaattcgtggcgtgattgactttgccggtatgatccccggcttccagatgctgacccaggacgataagttcaccctgctgaaggccggcctgttcgatgcgctgttcgtgcgtctgatttgcatgttcgactcgcagatcaactcgatcatctgcctgaatgggcaggtgatgcgccgcgatacgattcagaacggtgccaacgcacgtttcctggtcgattcgacgttcaactttgccgaacgaatgaactcgatgaatctgacggacgcggaaatcggtctgttctgtgccattgtgttgatcacgcccgaccgaccgggactgcggaatgtggagttgatcgaacgcatgtattccaagctgaaggcttgtctgcagtcgatcgtttcgcaaaaccggcccgataagccagaattcatgcaggaactgctgcgaacactaccggacctgcgtacgctcagcacgttgcacacggagaagctggtagtgttccgaacggagcataaagaactcctacggcagcacatgtggaacgctgaagaagatctcgcaaagagtcccagctcgaacacgtggagctgcgacggcaataatgtcgaggatgtagccaagagtccgatgagctcggtatccagcactgagtcggcggaaacaacctcggactactcgcatattccttcctcgttgagcgcttcggcgcctctgctggccgctaccctgtccggtcaatgccctatccgccatcgggcgagcagcggttcgtcggcagaagatgacatcattggtggtacggcccatctcgcacagaacggattgaccatcacaccggttatccgatcggttggaacacatcacgtccgataccggaaactagactcacccaccgattccggtatcgaatctggaaacgaaaaacacgaccacaaaccagtcagcagtggatcgtcttcttgctcaagtccgcgatcttccctggaggatcaatcggacgacaagcgtcacatcgtggaaaacatgcccgtgctgaagcgggtcttgcaggcacctcccctgtacgataccaacagtctgatggacgaagcctacaaaccgcacaagaaattccgtgcaatgcgtcacagggaaagtgaagccgagcctgctccaagttcgtcgtcctctacaatcactctgtcatcacattcgccgaaaccatcgtccagctcttcgccgtcttcggtggtatcgtcacacagcagcagtatgggtcaatcacctccgcagcaacccctttcgcagcttcatatgcatttaacccgaccgttgaatcagtcaccacaccaaagccttcaccaccaccatcatcatcaccactcgggaactcctcccgctagccatcatcagtcgtcttccctatccagcacccattcggtgttggccaaatccctcatggagcaacccacgatgactccggaacagatgaaacgttccgacatcatccacaactacatcatgcgagagtcgcagcaatctcagcaccatcccgaagcgcagagttcgtaccggagtggtctcctagtttgcagcccacgatcctcatcggtctcgccactgacctccagcagtagcagtagcagtaactcatcctcctccagcagtggttgtccattctcagccaatagcagcagcagcaggtggcagagtggaccgacaagcgttatcaccaccacccgccagcaaactccttctccatcgctcaattccaccggaagtgctgatacttcctcctcttccagtactgccagcagcagtactagcatccgctacttccagtcaccacattcgacatcgatctccccaccggtggccgtcatggcccaacaagccagcagcacaaccaccggatccgttggctcccctcagtccgtggtgacggcaccctctccctcccctcgcctcatcgagcttcaagtggacatcgctggcggttccacttcctccggcaccaccgatgcccccctcaacctgtcgaaaaaatccccctcgccttccccagctcgccaccaatcaacctcctcgtcctccacagccaccatccataaggtgctattggaagcgtaa

SEQ ID NO: 390 - DNA, 4617 bp, Aedes aegypti
ctgagcccgcggttggggctccctggatgttgcagcgggctaccagagtgtacatattttcccgcaaccctgcggttggatttagtctgctgtgagcttttgaacggtgcggatcatctcttggcctatgggatccacttgttggaccagggctgttgtcttctccccaacagtttgaagcaagaagaagtgtgcggaaagtgcgacgcggcgaggaactgaagaaattcaaacgggacttgaaggccccaaggaaggtcttctatgtaaatggttttcaatcgctaggcatttggacggatggaggcaaactagtgcgtgacaaatcgtggcacagacaagcaagctggggaaggaaaggttccattagtgctcggttggggtgttgattggcgttgtgctttatgatcagaagggtcaacaactcgatcgaaagtgagattctggatttgaaatttcaccgtgaaagtcgggctggaaaagtgacagtggtgctatttcttctctactcgggagtaggggttcgtgttgtccaagttggacacggagttgccatcggtggcacagtgcaagtgaagagtgaagaaagagaagaactggagtaggacgaagcagcacaaaaaccgttaagatgttgtccggacgagggtttaccgtcttggctggagcacttgcgatatgcactatcctatccagcgtggatgccctccaaggatactacggtactaagatcggtgatctcactcagctgcatcatggagtttccggatcggtgtacgctgttgatgccagaacgctttttctgaagaacttcaattacgacggagaaggtccaggtaagtactttagcgttcccaccagagtaaactccaaccgacatctcttctgaatcaactccaagctgcgtacttctacgtgggaaacactcgtgcacctagcaacaagggagctcatcgcctgcgggatgaacgtggtcgttccggtgtgctgagaaagtatcgcaacgaagacatcactttgtcgctgccggagggcaaaactctgcgggacatccggtggttctcgatttggtgcgatgactttagtgtcaactttggtgatgtagtcattcggaatgacttggattttccgaggccaaccaaaatcggacagctgggtggagtgcacgacgtcagctcggacaacatagtgatcgtcgatgcgcagacgctgctgattccaaattttaactacgatggagaggcaccagacgccaaattctgggtaggacgtggggcaaagcccacctcccagggcatccgcatcccagacgagaacggcaaggaaaccccgcttcgtcgctacgacaaaaagaccatcgtgctaacccttccaggtgatctgaccgtgttcgatatcggacatttcggcgtgtggtgcgaagccttcaccgttgactttggccacgttcgcatcccggaccagatcaatgttcctccgtcgctgaagatgctgggcatcagcccacagtccaaactgaactgcgaagtgctgctggatgacctggcattcgaggtgcgatgggccgtcgccggcgagagcatcgtcatccaattggtagccaaattagaggatggagagtacatgtcatttggggtgtctccggatcattcacgcagcataatggtgggagctgatgtggcagtcgtgtgggttgataaggctaccggaaagggatacgctcaggactactatctggatgccaagtcgcagtgctctggagctcgcggaagttgcccggacacgaggatcaacgaaaacagtagttcgatccgtctgttgaatgccgccatggttaacggttactccatcgtaacttatcaacggccgttgagagcatcagatcatctggatcttccgatcttcaccaacggatcgcaagcgatagtttgggcaattgggccgctgaatcaacgctacgaagtctcattccattcgcagtacttgaaagatactaagcaggttgacttcggccgtcaaccgtactggaattgccctacaccggaatcggatcaacagaagcaacatgagagccctcagaaactacaaagtctagagccaaatcgtcgtgtagattccatgaaacgtccgaatgcaccggcaaccgctcgaccgcccgctaaggctggtgcctgggagatacctccagttcagtgctacgaaccagaagatggagtattctatgctcagatgggtcctaccggaggcaaacaaggctatccagcaatcaccggtcatgttggatggggcatctcgtggtacatcaatggactccttataccggaaatcaacgtggttcgtggcaaaacatacactttcgtaactgaaggaggcaacgatccagagactcctgccaaatatcacccattctacatcactgatgattctgttgggggctacgaacatcaggacgaggaagccagaaagaatattcgaatttttgccggagttcaccagaatcgcaatggccaactagttccgaatggcgttgggcggttatgcaactggactccaaatcctgatggtccccctgcggactcgtatccttcgtttggtgcttaccagagaagtctcaccttgaaatgcgaccccggtgagccaggaatcatcacctggactcccgatgccgacactcctgacaccgtctactatcagtgcttcactcatcgttacctgggatggcgaatcaacgtccacgatgcgtgcgatgtagctgccccgagcgaaatcgatgaggtctacgtggatcctaacgaagaaggcattaatgctgaaccgtcaattcgacacgaatccaaattgctgccatcagacactttcctggaacaacatgagaactttgttcagaaaaacgataaggatctgatcaaaaaccataagatgaccgctgatcaaccaacggagaacttgaagctggatctagaaaacgacccggaaatgtccaaaatcatcgaagaaggcatccgagctgccgaagacctcgaagaaaaactgaagaacaatcaaacatatgcaaactacacctccaatgaacagcatcctctgtctcactctgaaatcatgcaccatggaaagccgattcttagctcctctggattaccagtttatctacgtccgccaaatagtggtccgatgttccggccggtaaagcttcccatgagacgaccaatcgccgttgaacgacgccccgtcaatggtcggccctctcgcccatacaacatacctcagccttccatgatcatcagccactaccaaaaaccggtcaacccactgatgcgaccatttatgcccaaaacaaagctccccatgaaagccattgcgccaattttgctgctcggggaaccaacagaaatcaaaccattccgcaaagttcctcctccactacctccacagtcaatgattcatcaatctatggaaatgatgctcgtgaaacccatgaaaaccgttccatacatggttcccgatgtttctccacatcttaccatgagcctcaagaagatcgaacccgctccgatcacacttcccattcgtctcaccaagcgaccggtcctggtagaaccccaaaacgtgaaaccaatattcaaagctccgtatgacgttcacgaaaacaaaacacccgttgatccgcagtccagcgttggatttgagccaagttccgtagtagtagaaagtggattcaaaccgatctaccgtcgcaatggtatgatgaatgccgaatacgacgatcaactgcgccatcatggggatatgattcaacggcgacaggactacgatattgacgaagccatagagagtgatgctttgatgattggcagtggtgaaccacagcggcaggctttcgaaccaatgttcattccatcacccctggacagtatggctatggcgcacaaatcagccgaagttggagatcgaaaggatgacattgaacggttaactggcgacttgaaggaaatgaaagttgaagaaggtgaagataagatggcaatgcctgacgatcgagtagattcgtattaccttccaccagagacgcaaaacgttgtcaaagtctatccagaaggatccgtagtttcatacgatggtaaagcggtacttgatgtatctttattgaattcgccgagcaatgtccgacacgaagccattaagtccgtttccaagacagaacaattcatcagagacactccccaattcggacctttccgtggagaaatcccacccatctctgattacgttgcgccagactcacatccaatctacggaattcgtggatcaaattcagtacaaccaccagtttcagagtatgccaaccccttggtccccggtggcatcaacgtgcaagacaacaaagatctcagtgtaaaacctatctccaccaaactatcgattatcaagccagtcgaagaacaaccggaagagtcacgaaaaaagcgtgaagcgcatcatcatccagaccaccacggagatagtcacgatgacggctgggaagagcaacgcaagagcattagcagcacgtcgactacgtcaatggcaacactgctttatgttctctctcctctgatacttctccgaagagcgctgtaa

SEQ ID NO: 391 - DNA, 6075 bp, Aedes aegypti
ctatatcttgcttcaataacaagaattattacagatttatttaatttagcgaaagtattagcaaaagacatatgaaagggaagtctctcatgttcgttaggcagcaacagaatagatatataaataaatttatgtttaagtgggaccagaattgtgtttaaaatatgaactgtcgaaaccgagtctaattcgtagaatataaaaagatttttaactccaggctcatttgctctcttggtgctctttggaacaatcttccctgcctctgattttgcatgtttcctcgataactcacagcttgcataaaagtcccgttacttatgctcgccgctaggttccgccacaaactctcacaacatgtgcagcatactttcacccaccccctatgtatatacgtgtgagtaacgaatttgcctcattgagtactctctcccaatgatggtgttcattcagaaactgactcattcccattgagcagttttgcagttcgaacggactcgttcgctcagtcatcgaacggacttgctagcgcacggatctctctctcggggtcgccgactgacggacggataggatagccaaaagcctcatcaatccaggcagatcagaagtagcagaagcagaagcgtggactaacataccgtcagtcgcagagttgggagtaggagtaacgtcaccgtagcgaagcctttactgctgtagtgtttccttccaccatatttgtgtgattttgtcggggcgcgcgtttgtgtaggtgtgtgtcgtctaccctctagtgtgtaaggtctctggtctaggttggtaggtagttgtgaaccgtgcggtgaagtagcagcagcgcagatattaaattcagacaaccgaagtaagcagaagtgtgctgtatcgtcctcctgcgctgcgttcatcgtcttcgcacaagagtagcaaacgcatcgtcgacggtggtgtgtcgtcagcagctcagccagtagagctattcgcgtggaacttggtgggtttagtgcttacgcgatatccggacgaagaagtgcgacggttcgacgacgaagagaaatcgagactctcggggcgctgagtttgaccttatgtaattgggggagttcggcagtgcggatcccgtgaaaatttactggcttttccttcgatattcgacgtctaatcgtgccgtgagtgagtgagtgggtgggtgtgaaaaccccttgaagaaaaagctctcccgtgaaggtgtctcctgcaagcagagtgcttcccagaagggaaaatccagggagtagcattaggcgtggtagtgtgatttgccagtctactacagtctctagcgagacgaagagtgaagtgtacgaagcgaggtgtggtggattgtcgtagttgtcgggtgagcgagtaaagtaatggagtgagaagagccaagcgccgccatcggtgataagattagctaattcaatacaagtgcgggagcttttctactccatattggggcctgtgcgtgcaaagctagtgataggaaaggtttctatttagaggattagagtgtctagcaagtagcccagaagaacaatggataaatccggtggaggtgattcccgtgatggaggaccttcgtcgtcgtcttcgtcatctgcctcgtcaccagcgccacagcagactgcgacagttccggccattgggtgtggttccagatccagctcgagttctgggacatcgagtaacaccgcccctatgacgttgaacgtcaccaccacgaccgggggcagcttttccgtcctggttgacggtgaaaattccgtggaaaacctcaagaaaatcatatcgaaaaagctgaaagtctccaaggaccgtatctgtttgctgcaccgcgagagggagcttcacgatggcactctacgagagaatggactgatggatggctccaagctgatcctcacaccgaacgttgagactggactgctggcacaacgggcggagaacactgtcatgcaggcgctggagtcgctaaatgataatcaggtgaacgattttctcagtggtaaatctccgttgaacttgagcgttcgattgggtgaccacatgatgcttattcagctgcagcttagtactttgaacccttcgtcgcagagtggtagtcgctccaaaactcacaaatctcgcagcttaactggaggaagcagcagctctaacgcagctggaactagtctaatacaagcttcgtcctctaggagtaggaccagtatcccaatagggttccgcagagtagctgccgatggctcgagtgggtccagcaacagaaccattgttgaacacgtgaccgagacacagaccttcacaaagcaggaactagaaaatatccatagcatagtgagatctgccgaaagtgaaaaccccacaatggccattgtgcgcccaagcgcaccggagccgatggagactgaaccggaagtcagaccttcggcatcggagtcaccgatcaaatccctatccaatctggtctctagttcgatcaacactagtaacattcccgtaccgtgcaataacaacagccttccagtggatctgccctcaccttgcacggatcccattagcgccaacctcacctcatgtctttgcaaaagactggacaacaacgacaacaactcttgcgatacaacctgctcctcgcgtgctccagaacctcaaccttcgacgtccaacgccagcttgcatcgcaccgcacacaatcccatcacgcgtcacaaatcaaaggtccactctctccggaagcactacagctttgacagcactgccttggagaagacggaacttgaaacagtacaaccggtggcctcgacgtctgctcccaactctccacagcgcccggatcaaactcttgtgcaccattcacatcatcaccaccaccaccatcagcactatcaccaacatcatcatcatcaccatcacccaagtcatcaatctcaatctcaacccggtccaagcaacgcctcgcgagccattagcactgacccggcaaacgcagagaaccctgcgctagcggaagcctcccgcaatctaacacaaaccctccggaaactgtccaagcgcgtattcaccaacaaggttagcgacgccgcacaggaacaggctcgcaacgtcagctctggagcagtaatcgagtcgatgaaacaccacgggaagggcatctactccggtaccttctcaggaacgttaaatcccgccttgcaggacaagttcggccggccgaaacgggatatctccaccatcatccacatccttaatgatctgctcagtgctgcgccgcaatgcgcccggacaggaaccaagatctacttcgaaccatcgcagtcgacaagttctgcctccacttcagcgaccaaccatgtcacagctggaacaagctctagcaccggatctacacccaccagcagtaccaacgggagcaacttgcaagccgcagccctgatggcccccagtacccttaccactccagtggcaacgcctagccctcgattggtttcccgttgcgtcccggcgtcgatccacaccaaaaagtatcccagcaacagcaacggaacgactaccactgtcgcaaaccttggccctagcagcagctgctgcagcggttgcaaacccatagaaccccaaaccaacggtggcgccacttcttccgcccttgcagctcgctgccttcatcacgctccgaaagccaccccgaaagtgctgtgcaaatgtggcctcccactgacggcagcacccacggcgtcgtcgtcgtcgtcgtcggcagcacccagcagtgccccacaacattgcccacgctgcgccgccgccatcagtgcagccgagctggaaaactccaaaaccaaatccaagctagacaatctccgcctgattatgcagcagaaaaaggaacgccgcgaagcacgtaagcagaagtgtgcgccgtacagcaccgcggcaacgtccacgatggcctcctcactagcagcatcatcatctccgttgtcggccatcggagtcagtgggacgacgacggcggctgcggccgccctcgttaccccacaccactccaccttttcagccaccgccaccaccgccgaagctcaacccattgaagagacaatggatacgacttcggccctggctgcaggagaaactccagcgacggcggcggcagccgtagcagcatcagaatccacgggagggaatagcaacagcagcaacagcaacgcagcaaattcggccactgccaccgctacggcaacgaccaccaccacagcggcggcgacggcggctgcgacgtcttcggaggcggctcaaagtcaccagatcgtcgaagaggttgatactgttgcataagaaaatctacggaggaatactttcaggagcagcaagcttaaccaacaatgcagcgcaacacagccccgacgaattcaactttaacttcaatccgagaggaatttcagcaacgttggcgtagaacccgttctagtagaggatgaaatcattttgtacaaaaacgaatagtcaagactaagcaaaatattaacacttaataaataacaaagtactaacagcataaataaatttcttaggcaaaagatgatacatttctagcagatagagctaacctcctgtaagcattgatgaattatcccgcaaaacggtttgatgcgaatctaaacaccctgaagaaactagaaatgagaaaatttatcgcaaaactacggtagacgcagaacgatgatctccaatttgaatgaatgttccgctaccggctagccaatcatacattgcgattgataaatcgtcttagaccaggtcgaaaaaaaatccaagctgtagtaagtattgataactgcgaggaaaattagcaaattctacctatatctttaaggcaatcactaaaaaaaagaatataacacaagacactctttaagcaacaatggcttctggtttccaaaactatctccattaatagtaacactaactcggtgcaataccggaatttattgaaacgaaaaaaaatcctgcttctcctaaaactgcaagcgacaaaaaaaattaaaactcattcctgtactatgagcaagtatttgtagcgaagagagcgagaggccccttcatgcgtactattagcagcttagtgaatcgaatttaatcaattctaaatctagattttgcttccttggccgcgcgtacttttttcttacgttttgttttcactctgttcacacgatttttgttttgttttctttttttgctctaattctgttctgcttagtttaattatcttatctactgcggatgaaccgacgaaaacagtagaatgtgttcttttaacaaaaaaaatctattgtcttctttccctcgagagtttggcgagtcgacctcaaaggttccgaacgggattgggttttattacaatcatttaggattacatttgataaaaaataatcaacaaattgagcgattgtgcgtggttattgtttgtgttagaatcgagagatatgttttttgatttgccttactatgtttattaagttgagatgagaaaaataagaagaaaaaaaagttagttgtagcgtgaatattataaaacacagtgattgtgtttcgtagttgtaagctgagcgatgttccgaagcaagtagcattcgtacatttgaacgaattgatttaacggaagggagtggtacatctttcaaagacaaacctagcaaatatatattcaaagaataaacaaacaaaattaaatgaatgaataaagaaatcacgtcaagcagacatgcaaactaaaaactatgggtgagcgtcatttgaaaatgtcatgcccctggaacacaatggtgtagcgtaatgaaacggtatgaagttattaatcaataaagtaaacaaataaatcggatggctaaagaacaaatcaacgtgtaatgactaagaagagtaaatcttaaacggaaacaataaagaattattgcaatctacggcaaatcatgtgtgtagttatttggcgatgacatgatcacaagactgaaatcaagctattagggtggcctataacacagggtaacaaaaattaca

SEQ ID NO: 392 - DNA, 1473 bp, Aedes aegypti
atggcttcttcgccgactaatatcgatgatggatgtcggctctgtttgaatccgtttgtcgaaagttacagcactatcgaaagccctttggtgaaggaacagatggagaaggtttttaaatttccgattgaatttaaaaatggattgagctctagcatttgtcaatcatgctcgaatactataactgatttctaccattactcggaagaagcgcgtaagaatcaagagtttttggaagctgagtactctgacgaagaagttggaacgtcccaaaattatccaacattcgaaaaccaaatagactcggatgacagtcaatcgtacggtccaagggcaaaaattttggcaattgaatcgatctacagtgaggaaacagacattcagcaggagcaggaaccgattgacaaaacatcaaaaaaggacgtaagcactcaaacaggtattgaagattcctctccaaagaaacctgcggaggatgatgaggataaatttctcaaggaacattttgcgttgaattgcgatatttgtgcagccagtgtttcgagcttcaaactactacgcagtcatttcgaaaatgtacaccatctcaaaaacgcatatgtgaaatgttgcaacaaagtgtttcacgaacgaagtactatcgttgaacacattcgctgccaaagccaccatgtttgtctacagtgtaagaaatattttagatttaaatcggctttaacaacgcacatagccaatgaacactttatcggcaagcaccctcatacttacacctgcggtcattgcaaagcgcatttttcgtgtgaaaaggatttgaattcacatattggcgaatcgcacactaaaagcgaagagcagcagtgtctaatttgtaaccaaagggttcgtcttcatcgctaccaacgacacatggaagaagttcatggtacaaccaaaggaaatagaattgtgcacaaatgcgttcactgtccacggtatttccgggataaatcttccctaaacttacacatgaaatgcagtcatcatgagtgtgccaaatgccacaagttttttgaaagtcagcttttactgaacaagcacattgtagcagaccatcgcatgggctttgtgtgcgaattttgcggtaagcatttcataagcagaaccccgtacgagctacatgtgaaactacacaaagaatcggaagctcccgagggtttgtaaaccactgaaacagcacagattgtgtttcaagaattcgaaaaaggaatgtgtggaatgaatgtctaccagctggactgtatcaattccttgacagcagattgagaatagcaaggtgatattcatactcggtggcgtaataggttagttcttgttttaggttatcaataaaagaaatctcagaaatatagtcaaccttgtcaacgaccatttgaagattccttggatcgatttgcaactttgtagctctctgagtaataaatcatttatcttgtt

SEQ ID NO: 393 - DNA, 1308 bp, Aedes aegypti
atggaaccgcgagtggatagattgtgcattcgcaattttccggaatctttcagtgaatcggacgtcaaagaattcctctctcggttcggtatcggtagtgtggagtttctgaagcgtcgtagaaaacttacagctatcgtttacagttcggaacaagtgttaaccaagtgcattctatcgcgacttcaccagctgaaagtcctcgacaaacggctgattgttgagtactatgaaggatcggcggaagtggaaatcgtcgatggtgagagtgagacaaagaatacgtccagggtccattcggctcaagagttaagcaagtttgttaaagccctacacgccgtccatccagtggactttgatcagcctccaccgccgtatctccggtatcgatatcctcgagctacgcgggaaataatcgacagcatttgtgtggcgctggaatcggtgccgaagttctacacccaagtgcttcatttgatgaatcggatgaatctgcctcctcccttcacgacacgggatgtagaacggcggggttccgtagtggagaaacgggatgctgtccagcaaacggatcctgttcgaatcaaagagtgtctcctggtggatgatgaatccgaacttgagtcggacgaagaaacgccacaggctgtaggacctaccaagcaaaaggtttctctagatagaaaccgattcaagccttacgttttgccacaagtggtcaacgttcctcataacggttcaaacttagttaaatctactcctcaacctaaacccatgaaagctagtcagaacatcattcttcggattccagacaaactcaagacttctaagaaagttcctacatctccaccgaaatctcctatgccaccccccacaaatcccccaacaattaccacggaaatcgacctccttgccaatcgcatcccaccggaccaattgaccgatctcccggtctttaaaaactacacccccggcgaaccatccaacaagctctacctgaaaaacctcgccaaaaccgtcactgaagacgacctcaaacgaatcttccaccggttcgccatcaccggccatcccgaccgcgaaatcgacatcaaactcatgcaaagtggccgcatgaaggggcaagccttcgtcacattctcctacatctacgaggaagacctcgacctaatggaggagaagcccatagcacgtgcgttgaggctcaccaacgggctcctactgaaggacaaaccgatggtggtggcgtacgggaagagcagcgcggccaaagtcgaaaaagaagacggaggggagaaagcgtcgtag

SEQ ID NO: 394 - DNA, 4841 bp, Aedes aegypti
gatgtaagtcattaaaatctgattttgggaacagtacatttttaatttcatactaattgtacgggagacaaaaaactttgaagtctttaataaattattttatttgttcttttggacggaaaaattatctaaatatactgttaaaacgccacttacacccatttgcgtttgggcgcttcaactggaaaagggctgcgtcgactgcatgagcgtcagtgtgcatagagaagatgtgcatcggtggcagcgtttctggaatagagcgaaatagcagtgaccgtcaaataaaatatggattgtgccacaaacggagcacggggtggattggattgcgagcttttgcaccgagctctcggttcatgttgacatttttatttctcttcgtttgaacgtgatactaatctatcggcactcggctgaccgattgatggcgtcggatgcgatcgtagtaggcataacgacatttccacgtgcgcctgtgtgagtgatgccaggttaggagaaccataatggcggaaaatattgtgtaattttcagttatggtggcattttccggtttgaaaaatcggtgaaattacgtccgaattcagtttgaacacgtgccaaagggggtctgaagtggtgattttgtgaaaaattgttttgttatgcgttttcggcgacgaaaaatggcgaaaatttagtgattttgatttttgaatagatcctgttgctgaggtggcattgcgtgaagaagatcatgcgtatggctttactgcaaggcagttactatccaagtgcaacgaaaataattacgtagttcaatttaagcatatgtttatagtgtggtcatctaatttttcagaagctacgtaaatcaaaactgtgttgggatcaaagctttagttacactgaaaaaaaaaatcgtctgaatgatttttgcaaacgtgctcaccgacaaaatttgaattaccagtgaaaaaatcgaaaaacctcaaacgtgttttcaattggaatcctgcaatgaagagcaaatacagtgctgttaccaaataaaacccttcatgcaagggtagcaggtgtattttccacaccgaagccaggaaaagtggaaaaacgaagagagaaattttccagcaaacaagtgaattgttcctgtggcgcaaaaagaagaaagtctggtgacgcaactctggcttcctgctcaaacaaaacccggagatggtgacgatgcagtgtgcttactagtaacttgtgcttgcttacggtaaccctaccatacatttaccgggtcgggctgattcgagcaacagatgccgacgacaacgactacaaaaacgagaaccgattgcaaacaactcggcttgttataaatattgtggtacccagacaaaaaaggcgatcgtggaaattctacactaaactggttggaagtcagccggaattcacacacgaggccaacgactcaaaagcatgaccaataaagccagacttcgcagctgcaaggaactgtgcaatccgaactttttctgtaacgtgacttaaactcggatctgaaatttctcttgcgaacaacgccgaccaaaaaagtgagtgaagttgctttcagcttcacgttaaatgttaggaagtgtgttaatatatagcgtaactgaattaagccgaccgaagaaggaaactgaatgtgatatcaattagtgtgtaagttagtagcttgaaactcagtgattgaaaacaacgagcttttgtgaagttagtaacgatccacaaatcaaaattgttaaaatagattttataacggtcacaaagatggaggatgatccggatgacaaagatgataccaaaaggaagtcccggaacctcagtgagaagaaacgccgtgaccagttcaacctgttggtcaacgagctcagctcgatggtgtcgtccaatagccgcaagatggacaagagcacggtgctcaagtcgacgatcgcattcctgaagagtcacaacgaaatcgcggtccggtctcgggtgcacgagatccagaccgattggaagccttcgtttctgtccaatgaggagtttacgcatttgattctggaggcgctggatgggttcatcatcgttttttcatcgacgggtcgggtgttttacgcatcggagagtataacgtcacttctgggtcatctgcctagtgacttgctcaacatgaccgtgtacgatatggtgtacgaggacgaccagaatgatctgtacaacattctgctgaatccggcggcggtggtggatcctttgcagacgggaatctcccgtgaaaatcaggttaccttttcgtgctatatcaagcgtggtacggctgattaccggacggaggtttcgtacgagttggttcaattcaccggatactttagaagtgatgttgacgctgattccttgatgacaacgtcgcggtttagtggttacatgaccgatgccgatacgaggttgatcttcgtggggacgggaaggctgcagacgccccagctgatcagggagatgtcgattgttgatagttccaagagtgagtttacttcgaggcacagcttggagtggaagtttctctttctggaccatcgggcaccgcccataattggctacctaccgttcgaggtgttggggacttccgggtatgattactatcatttcgatgacctggagaaggtagtttcgtgccatgaagctttaatgcagaaaggagagggaacctcgtgtttctataggtttcttaccaaaggccaacagtggatttggctgcaaactcggttttacatcacctaccatcaatggaactccaaacctgaattcgtggtgtgtacgcatcgtgtcgtcagttatgccgatgtgatgaaacaaatgcgaaatcaagctggtggagagggcaagttttccgaagatacggatagcgtcagtataggggtagagcggaagtttcaaccgagctcgtcgcaaagtttactggcaacatctccgtggagttcgaagagctctcgtacttcacggatagcgccaactccaggaggatcccccacaggtgctccgtcaagaggaagacataggtacaacacctaccaaggtcctggatctgactcggcaacttcaatgtctgctgaatcacatgtcagtcgacaatcgatgatgacgcagcatagttcaaaatcacgagttcgctccaacactttccactcaaagccttcctctcaagacggaagcagtcagcatacggcggctcatttcatactccagcagcagatgatgccgaatcctcaacagccatctccggagtcttttcaacagatgctggcgacaactcagcaccagattcggcctcctccggcagctgcaatcatcaccccacccgtcactcagatcatcagcccagctgggtttatcgaaccgcaacagtatttggcagcgattccggtgcaaccagtagcaggatttcctccggactcgtcaaccggcgttctgtctcccattccaccgacatctcctgcggcatatgcggttcatcctactgttccttctgcggctgggagcgtcgtgctaactccagcgcagaaccaggttcaagatcagttacagagaaaacacgaagagctgcagcatctgatcatgcaccagcaggaagaactccggagagttcaggaacaattgctaatggcgcgttacggcctgttaccttccattgtgactcttccattcacatccgcatccagcagtaccatcgatattagtagtagatgtagcagcagtacatcatatctccaacatcaccagtcatctcacagtagtcatcaatatccaacgcatcctagtctggcgaatcagccgcaaaacttactaaacccacagccgcaccaatcccagcagcaacccgaccaacagatgtctatacctctagatcagaaaccgatcttccatcctaaccagcagctcaatttcactgacactggacagccaaagcttcctggagaccctaacagtgaggctatttcctacatgcagctaactcccgtcccaattcatcacctgcagcaacagtcacaacccttgcaacagcaacagcagcatcatcatcaaatgcagaaccctggtatgaatctacccggccccagtggcaacagcatggagctattgcagtaccaaatggcagaagagcaagctcaaaccttgttcacatcgggcatggagcaacagcagcaacaacaacagcaccttcctcaaccgcaacaacagcatcatcatcaccaacaacagcagcagcagcaaatgcaccatcagcattcgcatcaccatcagcaccatcatcaacaccaccaccatcagcagcaacaacaacaacaacagcaacagccgcaacatcaccaatcacaacatcatcactcgcaaagctcttcagtggggtcgccgggaggttccacccgaagtcaccccaggagcgatatgtagctttctcattagtgatgaggatatgagagaactcaaccaaagtgctatcagagttttgttgagaaatgtgagttgtttattatacatttttgaaaatcaagttgaaatgcgaaataattcaaaatttgaagtgatgcgaagttccattatcgtcacaactggtatagttgtgcccgtgtttgctaagtcatagttgagtcggaagtggccagccaacgctttgactatgagacagccattttgctttgatagattcgttaaatactttgccacccttggagatggctcagttatttacaattttgtttgatgacacgactccaaactgtttcagcattacttgggctgagtagccgccaagaattgatctgaagcttcacgcagcacat

SEQ ID NO: 395 - DNA, 2793 bp, Aedes aegypti
atggaggacggaagcaatagttgtagcagcaacaccagcagtagcagcagtagtagtaccagcagcacaattggtgatagtgataaatgctccgacgctggttctagttccagtgaaaaggatattgaaagtgaaaatgacaaggataatgaaggcagccgaccggacagcaatgtaacggagaatggaacgaaaagaaaatctgggactaccaacaatggcagtggaaatgaagacgataaggaggtcaaaaaggtggcagttaagactatcgaaggcaatatgggccctttaacagcgacggttaaattcataaatcccttcaaaaacaactggatcaatgcggatcgactgaatgagctcaggaagaaggtgcaggatgcttccaaacatcatcgagtgtttcttgtgcggggttcgttccacacagtgcgacgagctttgaccgaaaggggttgggtggagaagttagacgggtttagggctaagccacaggccaacacttcttcctcggggtttattttggaggatctagtacaacagctcccagaacgtaagccaggcgaatcacgtaaaaaccacattgcaaaatgtgagcgaagtataatgtcacgcttcctggagcataccccaatcgaccttctatggacggctcgcagggagaaggccgattggttggatatgactaaaaattcttccctgatcatcaaccgcttcagcaaggcaccattcacaacaaaagaaggtctatgttccgctctgcatgattttcattggttctacgaggaaggcatgtccgagacctactttcctcgctgctacaacgtgtggaatccagaagagctcaacgagttcatagacaactttcgtctgacgtcttcgatgggactcctcaagtggttggtggaaactcacgataaaagaggtatcgatgccattctgtcggacgagggaaaagttccaggatcgtgtataaacttcgcactctcgcgctgcaaggagtatttggattattgtcttcacaacgatatcgacgttgaagaggacgtaaaaatctgggaccacgattgggacgtatttcttacccatcattatctgctgacccacgagggcggtacaatccagctaatgaaggaagaagaagatacgaatgcaatcgcaaattacgttgcggaagccaagtcagtcttggagcaaatcaaaaaccactggccacaatatgcgctcgatgggtacctgaatatatggatcgttaaaccgggaaacaaatgccgtggacggggtatccatttgatgaacaacatcaagcagatcattaccatggtgaatccaccgatcgtcagcaaaactagatatgtgatacaaaaatacatagaacgtcctctaatcatacacaacacaaagttcgacatccgtcagtggttcatgattaccagcgtacaaccgttgataatatggttctacaaagagagttacctccgctttagttcgcaacagtacaatctaatgaactaccacgagtccgtgcacttgaccaatcatgccatccagaaaaagtaccataacgcagtgcgggatgaacggcttccccatgagaatatgtgggactgccatacgtttcaggcctatctgcgacagatcgacaagtacgaaatgtggtcagagcgaatctatccgggaatgcagaaggcagttattggatcactgctagcctgtcaagataacatggaccgaaggccgaacacgtttgagctgtatggtgccgacttcatgattacggaggatttctatccatggttgatcgagattaactctagtccggatttggcacccagtacgagtgtaacagcgcggctttgtccgcaatgcgttgaggacactattagagttgtaatcgaccgacgtcatgatgtaaacgcaagtaccggatcgttcgaaatgatttacaaacaagttatcccgaaaacgccagcctatatgggactaaatctacaactacgaggtcatcgtatcacaccaaaaagcactgccaaaaaggatcgccttcgcattctacccgttaaacctgtccaaaatgtcctacaagtttcgagacttgccgcttctgctgtcccaaaaccaaccacaggtcctgtgataatggatctgctagagtgtcttcaattcgataccaaaatgcaggaagaggaagaactccgtgcacgaactgccatctacaggaaatctggattttccaccagacccaatctacggtatgatttcgctcgtaaaaagtcgtatatcatagccaaaactggagaattttttcgtagaaacggtggaccgaagtatctgactgagggagaaacgtatattgacaatatcgaggactgggagcgcgctacgaccagcttctttcagaataattatgccagcaccttgagctctctaacaaccaatagaaacaacccatatggttcaggagatctacaaacatcacccaacactagtagtaccaatctgcgatattcctcgaaagctgcctacgctgccaactattgtgatgatttcgataatgccaatgtcgaaaataacactgccacaagtgagaatcctaccggttatactagatatagtaaactaacagcaaatagtagcaacaaaactgcgttatctacgaatttcaataatttctacacccttgggctaagccttcggaagcagaccacgcccaggagtccaatggccactcgaatgagcgccaacttcgtacaatcaaccgaagatttaattgagttagggaagaattgttaa

SEQ ID NO: 396 - DNA, 4421 bp, Aedes aegypti
atagctgcccaggaaacggaaatcgtccgcaaacagtacaccaaagtcctggacgcctacggatgcctcggcgtactgcaactcaatgcaggcgatagctctctactatacctggtgatggttaccgggtgtttctccgttgggaaaatcttagacaatgaaatattccgcattacccaaacgcagtttgtttcgctacagtaccaaccgacaaacgaggatcgaatctccgaaatccgaaaggtgttgaactcaggcacgttttacttctcgtttgcgaacccggcggccagcaacagtgtccagttggcaagtggaggattcaacttcgacatcacactgtcggctcaaaggcgtcgacgcactacggagacggacaacaggttcttctggaatcgcatgttattcattcatatgctacgatttggagttgagtgcaatttttggctgctgaaagcgatgtgcggatcggtggagatcagaacagtctacgccgggagtaagcaagcgagggcggctatcatatcaaggttaagctgcgagcgtgctggaacacgctttaatgttaggggaacgaacgacgaaggatgtgtggcaaattttgtggaaacagagcaatgtatttatcttgacaatgaagtatcatcgtacattcagtctaggggaagtgttcctctgttctgggaacaacccggcgtgcaggttggttctcacaaagtcaaactttcacgaggcttcgaagcttcaagagcggcgttcgatcgtcacatgacttctatgaaagctaggtacggcaaacaagcaataataaatctactcggaacaagtctgataggcagcaaagagggtgaggccatgttgagcaacgaatttcagcgacatcatagggaatccaatcacacggatgtgccgcatatagtgtttgactatcatcaggaatgcagaggaggcaatactagcgctttatcgaaactgaaggccaaaattgacgccatgtgctcagattatggcctgttccatgccataggggacagcgtgttccgagagcagaaaggaaccatacgaaccaattgcttagattgtctggatcgtaccaattgcgttcagacatacattggtttagaaattctgaacgaacaaatatcgcaaatgtccgcactatcagacaaaaagcagcagattgcctctcggttcgaggaaattttccggcagatgtggatcaataatggtaacgaggtgagcaaaatttacgccggaaccggtgccatacagggtggttcgaagctaatggacggagcccgttctgcggcaaggacaatccaaaacaatttgctggatagctccaaacaagaggccatcgatgtcttgctcgttggttcaaccttaagttctgagctggcggatcgggccaggatcttgctgccgtcaaatatgttgcacgcaccgacgcctgttctccgcgagatgtgtcgtcgctacgaagagtttgtaaatcctttggatttgcgcattgcatgcggtacgtacaatgtcaacggtggaaagcacttccgaagtgttgcctacaaggacgtatctcttgcggattggttactcgattgccatcgactggctcgatcaaaatcattagttgatgtgagccacccggaggatagtaatgaaccaccgatcgacatttttgcaataggttttcaggagattgtggacttaaatgcatccaacattgttgcagccagctctgataatgccaaagcatgggccgaagagttgcagaaggttataagccgcgacgaggagtatgtcctgttgacatatcagcaactggtgggagtttgtctgtacatctacattcgaccccagcatgctcagtacatccgagatgtggccattgactgcgtgaagacgggtctgggaggtgccacgggaaacaaaggtgctgctgcgatccgatttgtaatccacggaacatcaatctgtttcgtgtgtgctcatttcgctgctggtcaatcgcaagtcgccgaacgtaatgctgactatgctgaaatcacccgaaagatcgctttcccaatgggtcgctctttgaagtcgcatgattacattttctggtgcggagatttcaattaccggattgatatggaaaaggacgagttgaaagatttgttgaaacagggtgacatcggtgcagtattgcagtacgatcaattgagaattcagcagaatacaggaagcgtttttaacgatttcctggagggcgaaatctcattccctccaacgtataagtacgatttgttcagtgaagattacgacactagtgaaaagtgtcgagcgccagcttggacagatcgagtgctgtggcggcgccgtaagcagagtccagatgctgataagcatcctaactggaaccctggaaatttggtgcactacggtcgagcagaactgaaacagagtgatcatagacctgtgattgcaatcatagatattgaaatatgcaagatcgatcagcaacgaagagcacaagttttcaatgatgtcatcagagatttgggaccaccggatggaactattttgattcaagcaacaaacgttcccagtagcgcagattctgacgaggacgaaggcagtatctacgacgagaacctgatgagcgcgttgatccaggaattgactcagatcggtgaagtcactctggtgcgattcgttggggataccatgtgggttactttccgcgatgggcagtctgccttaacagcagctcagaagcagtttgtgcaagtatgtggagtgaacctagccatcaaattgaaaacagaaaactggatccaacgagtggaactagagattctactttgcactccaaacacagtgactttctgcgacagtcaaataggcgattacaacagccttggcattccggaagttccatcacgcccaaaaagtcctccaaatctacagcaagcacctctccgaccggctcccccgagcagaccgcctctaccgaaatctccccaagcgtcacccaaacatcaaccgcagccgcatcatcaccatccgaaagccggggtcatcagtttgggggcagaagtgctcatggcgtccaagttgcatcagaaaccggcgatgcctccttcgccactggtgcccacttcagctacaacgaaaaccactcctcccatcgaagagtatgccagttctagtccaatacttggctcgccagctcatgggtcatcgcaggctagcacccctccccaggataccggagctatttacgaggaaatcagcgacgatattgccatacctgaaccgcgaggtccgccacctcctccgccgcgctgtgacgtgtacgacctggacgtggtcagcaacaataaatccaacaagtcgtctcctcctggtacctccggtggcagttcgggagccggatcgcctcaatcgtccattccgtcgcaagcaccacccaagacaaatcctcctccgttgccagtgcgccggggggttcctccgccgataccaaaccgaagtgggggagcgcctcccctaccagcgcgacccaacaattcctaagcccaggagcagaatatccaaagtttatatttaacgtaccaatcagtcaataatcatctaaactgctgactataataagggaatattctacctatttaacactgtcagagaatttaatcatccgtagctactcgtagaatcagcaactggaaagtactgtaactgctcgtaggcgatatcttattccgagttgagactaaacgtaatctctaacggtaatcacttgactgtgcatgttgcattagcatagtttagcgtagaaaggagatgttaatatagtgaaacataatacattccacagtttatagttgcatgcatgatatgtttgaatgttggcattattattggatattttgttttgtataattgagtaggagcagcttaatttgtatatttcgtgtatttatttgaatatattgatcgggtcaaaaatgtatgatggaatgtagaaacaaatgctaacgctttgtattataaagaaagaaatttaattcaacacgaaaagattccttatcaaacacgtattgtgatgtaattgcaaacaattgtaaaagtgaatataagttatatcaactaataagtgttaacacatcaaattattattgttgttcgattgccgttcccgaaaggaattccaaaactcgatggaagacaaaaaaaatacaatagctatcaatacgaaacaaaggatactttattgaattaatgatggtgtaaaaacaattggtaacaaaattaccaaactagtgaaatgattgcaatgaagtatgcgcccgttgaagcaccatatagaagagaattattaactattatgtaatccgttatagaaaacagcagaaatacaatctattcaaaatagc

SEQ ID NO: 397 - DNA, 1530 bp, Aedes aegypti
atgacgcaactggaggacgacgttctgctgaacaatctgctcaagttccccggaactatcataatctacaacaatgacctgaatacctacaattacgtcttaaatggtcacaattccattccactgacccctgccacgactgcactggccgaaggcaccatcgatctgaacggcgcagtttctatcaatgtggaaactgtgccaccggaagccccacctccacctgctggtcctattcagtgtttcaccgagccgcccgttacaaatcagcaacaccactacgaagaagctagcagctcgagcagcagtgccgatgtttgtaacgaatcgctcattgccaacaccagcctgcaggaagactgtgaatccctcgaagaagagccgatggaagctgaagaggaggactccgaaccagagttgactaacctctcgtggttgaccgaactgaaaaacattaccaatctcacaccgtcggatattccccagacggatctaccgacagcacgcttcaataaattcatcgcccaggtgcgaaggagtcgtgaatcgtacgacaaacgcaaagagcagtacacttcggtggcgaatgctaccgaaaaacctcccttcaattatgcgcaaatcatagcgatggccatgctggatgaaggacggatgaccttgaaacagatctgcaagtggatacaggaaaagtttgcatactacaaggtgcacaagaactggaataactccattcgtcacaacctatcgttgagtttctactttaccaaagtgtcacgcgccaaagatgaaaagggaaagggaggctactgggaactctcgatggatgcgtcaaaaagcgaaaggaaacgaattaggattcgtcaacggaatcgcggtagctcaacaacatcctcaatccgcagtcgtaaccggcagagaaagtctgcctccaacggtgattcgacgatcgattgcagtaatggcaagtcaactactaccagcagcgtagacggaaacaacaacgatagcccaacgactaccgtttgtcatacagaaaccagtgccgaacagatgatcatggatgatcaaatgatccacaacgtcaccatcgacagcgtggacaatgtcagcaacgccgattccggttgcgttgatatcgatcagatttccacaatcagcgaatcacccgttttaacagttaacgacgatcagttgatccggtccagcactttggtagagaactgcaatatcaatttcgattcgatcatcaacgcggagagtggaaccaatatctttaccaatcttagtgtagatgagattttttcagacaacgaaattccccagccagccaacgacgacatcgtggtaccattcttcggtaccaatggacagcagacggtacaaacaggacccaatgtgattgtcgaaaccattccgtattttcttcccgatatgggcaactttgacgagcaagacttcggcaacttgatcaacatcaatgagcaggaaatcagcgatgagtttctcaacgagcacggatttctgtag

SEQ ID NO: 398 - DNA, 426 bp, Aedes aegypti
atggcgcaacagcaacggagcgtaaagttcgcaaagttcgacaatccggcctcggtttcggtgaccccgacccggcagctgtcctacaactatctggcatcggtcaacctgtggctgctgctgtttccttgcgatctgtgctgcgactggaccatgggaaccgttccgcttgtggagagtttcaccgatcctcggaatatggccaccttgggagcgtacagcctgatcggagtgctggtttgggttgcgtttctccagggcgatcgacatcggtctggtgtgatagtgatgttcgcaaaaagcaaaatcaacgtagcaggcaaatatcttgagactcggggctctttatctcctccgatcgaagacatccatccatttggcggcgtgaatgttgtgtggtgtgttcgccacgtgtgcaatgcataa

SEQ ID NO: 399 - DNA, 1495 bp, Aedes aegypti
gaaaatctgatcgtcaacttctcgagagggaaagccagaaccagaagattttcttgggcgttagattaattttgtgcgtcgacggattaacacgtgtaggcttcggcggttctttgcgcgagttctgtgagtttcggaaagtgcgtgttctatgctctcatgatcaacatggaaagtgaaaataatgatagacctaacagccacagagcgaaaaacaatttcagtattgagcacttgttagctaaaccggatatctataggggatcaaatgttaagcaaagctatgaaaacagtggtgtaaatcatttacatagtggaaaagaagtgttggatagaacagaagatagatcatccagcaatgatccatatgtggaatgctctacatcgccagattccagttgtaacgaggaaatgatggataactgcagtgaagcagcgtcggaagaaagtactacaggaacatccgacgaccgtaagaaacgaccgagaacagcgttttcggctgcacaaatcaaagcattagagactgagttcgagcgaggaaaatatctatcagtagcaaagcgaacagcgctggccaaatctctgcatctaactgaaacgcaaatcaaaatttggtttcaaaatcgacgtaccaaatggaaacgaaagtacacatccgacgttgaacagctagcctcgcattactattcccaactgggaattggtaactttgcgcgccccatggtggttggcgatcgtttatggcttttcagtcaaactccaaatgggcctgctccagtgcaatcacttcttctcaatacaccgtctcacattggtccatcccatcctgcaatgagacaatatcaaccgatccctccaacgccgattggagtgtccagttttgcatctcgtcctagtaatggttacaccgtaaactacctcccgaaatcgtcaccccaagcaccaccatacagcttgaatcggtacccggtttcaacattcaaacccttgccgtttgaggatcccacgggattttacaaatctacaccggagatgacggatggctactgtgcaatgccaaaatttgggccaacggaattcgtaaacgatgagctttcccccattagtacaagttcaggcattgcagatctggaaagagcattcggcaatcctagcagtctgttggatggccagcttacttctagaacgagtgaaggactaccaaggctcagcgcagccacatccgaccatggagtacaaagcaatttgaaagacctcacaacggactcttccagtgaaattgattgcgaagagcttgacgataaagattgaagtttaagatgttataatgctaccaaaatgaactaaaaccaaataaattagaacaattaagtgttaatatcaaaatctgttttagtgttaattaatacacaaagggtctttaataaaaatctataatttgaacagaattagttcattaaataaaagcaaacaaaaaatccccaccttttgg

SEQ ID NO: 400 - DNA, 1158 bp, Aedes aegypti
gccacgtcgccaatattccgcgatcgaagcatcgaagaaacggaagccgcccatgatttattgtccttatcgcagagcctacccccgcttccggctccgtgcgttgtgacaatccttcatcccagcacggaaccgaccatgaactttgtcacgtctagcactccagtcagcacaacgcaaaccccacaagccacggacggtcaaccagcgacaacgacgctcgtccagaacggcagcatcataaacttcaccatcacttcggcagccccacttacgccacccacttcggagcactcgtccgacacggaaagcaatggctcttccccaaccacttcagcgtcggtggtctcattcgtatcgtcttccaatcaatccatcaagcggaaaaaagcatgtccctcaacgacactagtcgcacaaggcaacaagaaagccaatctcacggtatccgaacaatcggtgtcatcaactaccgtccaccatcagcctcagaacaaaccgaaacccgcaactaatccacctcctcccatagacaaacccaattctccaacagaccaaactcaacctcccgtagaacctccaaatccaagcccaaccaccacttcccccaagggcaaatatcggtgccctgaatgcggcaaaacctacgcaacctccagtaacctctcacgccacaagcaaacccatcggagcttggactcccaatccgctaagaaatgccaaacctgcggtaaggcgtacgtctccatgccggccttggcgatgcatctacttacgcacaagctctcccatagctgcggcgtctgcggcaagctcttctcccgtccgtggcttctgcagggtcacctccggtcccacaccggcgagaaaccgtacggctgcggtcactgcggcaaagccttcgccgatcggtccaacctgcgggcccacatgcaaacccactcgacggacaagaacttcgagtgccaacggtgccacaagacgttcgcgctgaagtcctacctgaacaaacatctggaatcggcctgctacaaggaggacgacatggtcggcggccggaagatctaccacagcagtcaggacatcgatcgcgacgaagcgcggcagagacagctgcagcaacttcaggacgagaacagcagcatgaccatcgatgtg

SEQ ID NO: 401 - DNA, 5355 bp, Aedes aegypti
gataacgaactctattccggaacggtggctgacttcagcggtcttgacccaattatctaccgggaaccattgcagaccgagcagtacgacagtttgagcctcaacgcacccaacttcgtcggatcgttcacgcagggcgactttgtctacttcttcttccgcgagacggccgtcgaattcatcaactgcggaaaggccgtcgtcagcagagtggcacgagtttgcaaatgggataaaggtgggccccatcggtacaaaaatcggtggacgacctatctgaagtcgcggctgaactgctccatgccgggcgattttcccttctatttcgatgaaatccaatcaactagcagcctggtcgaaggacgttacggcaacggaaactccaagctaatctactccgttttctcgacatcaaccaatgcgatagcaggatcggcgatatgcgcattctcgttacaggatatcgccgacacgtttgaaggcaacttcaaggagcagagtggattaaactctaattggctacctgttaacccatcgaaggtaccggatccacgtcctggctcgtgtcacaacgattcacgaaccctgccggatctaacactcaacttcaaaaagacacattcgctgatggatgaaaatgtgccaacgtttttcggttcaccgattttgacccgagtcagcacggtctatcgattcaccgccatcgccgtcgatccgcaaattaaaactcccggtgggaaaacctacgatgtgatattcgtcggaacagaccacggaaaaatcatcaaaacggtgaatgcagaatcagccgactccaacaagaaggtcacctcggttgtcatcgaggagatcgatgctcttccaactagtgaaccggtgcggagcttggaaatcgttagaaccatgcaatacgacacgccaaaggacggaagttatgatgatggaaaattaattatagtcaccgatacaaccgtgatagcgattaaattacaccgctgcagcagtgaaaagataaccagttgcagtgagtgcgtggcgctgcaggatccgtactgtgcctgggacaaaattgcgggcaaatgccgatcacatggggctccccggtggtcggaagagaactacttctaccagagtgttgccaccggagatcacgctgcctgtccgtccgggaagatgcccaaggatggcaacgcggagaagcaaggttacagaggtatgtatgattctcaattattgattgaaacacggataatcataatgcaggataagagcggctacgacgataagggaccgcaaataactccagatctgataaatgctcaatacacggtggaaacgctggtcatggctgtgctagctggtgccattttcgccctgttggtgggattcatcaccggttacttctgcggccggagatgccacaaggatgaggacgacaacctgccatatcctgatacggaatatgagtacttcgaacagcgacagaacgttaatcgacgtgaaacgtattgctctatgatacaaaccgaaccgaagctccttccacaggtcgaagaagtgacctacgctgaacccgtactattacctcagccatctagtcagaataagatgcagcattcgccaaaaaatacgttaaggaaaccgatgggtcaccaccacggtgtcaactcggaaactcttttccagttccagccagatggctatagcgctcgggacaactaccggggtcgcgacaactttggtaccctccgatcccaccaaggtgataattatcgtcgcggtgacggattctcaacaacgagaagcgtgaaaaaagtgtatctctgagacgggaacggggcggctgagaccagccagggactgatcaatcaaaatatgcatttttatataggtccttaataccaacactcgtaacagaagtctcggccgaatgaaaaggcagccgccccggcatggcatagtaacgcaacatcgttccgatagtccacagaattccagttccggatcttccccagtcatgtccaatagtagttctagtccggcgcctccctcgagcagtcctagtccacaagagagcccaaaaaactgtagttatatttatagagattgattattaaataaacccccgccaccactgcgacccccgcatcatcatcaaagcagaagcagcagcagcagctacaacagacccgtcgccccattccagcacgaagacagcgaagaagcatcaacagcagcggcagcagcgatgacaacggttattctacgcaacagaaacagccaaagcagtgacaccaacaacagaaaactgaatcgtctttcaacttcgtcctcactttcgatcattacaccacccacaactccaaaacgtccggtcggaggtcgcctcaaaatggcgcttagcctctcgttggcacacaatttcaaccaaaagctggccaacctcaacgataaatggaacgacttcagcttcatgctgaaaagcaatacggtcaagagcacaactcgaaacgattcgtaccactcgattgaatccgccgtaacctgtacggctgcagatctggaggccggtaatctgagtggcggcggacgtttcgacgaagaggagcaggagcgaagaagacgacgtcacaagaagggagatggcggtggcaatagtgggttatggaacagtggcggcagcagacagtcgcagcagaaaccttacgagcgacacagaacaagcagaatgtcaccgcgccgcaacagtgccagcggggaccccaaggagttcgacatgttagtactcaaaactacggaaaatttagaggataatgaaagtttttaaacacatggcttccattgcggttcagttgattttggcttttgctgaagcttttgctgcgcatttctttgtgtcgttgcagcaaatatattgaccggttggtctcaaacaggcacaaacgacaacctcaagcgatgagaaaccagagtcacaacaatgggaatgcttatcataaaaaaaaactagaagagataatttaatcgctttcattcactattaaccaaccattaagcaacaattagggtatatgcatccgcctaagtttagagcatttaaaaagctacgcaaaaagacacgcatccataacaactgatattaacaaacggaaagatctggtgggagtaacgcagaatactcgggtgtacatacgatatacagtgcatatatattataatcttcaaactattagggatttttgcatcagaaatagtcttgcagtgtgttacgagttacactgcgtgttgtaattgctgaataagcagaacactatatagaaacacattttgctgcagtattaaaaaagagaacataatcttatacaaatagggaagaaaaccaaaacgagttcgatgagaagccgtgccgtcgtgaacgagccaaatcctcaaacgctgagtaggtatgcttcatcacagtaagtacattaaacgtcatcatctcatttagagttacttttgatttcgtccgatttcgtcaaactcctccgttcatgccaaaccgtaacgaatactgatttcattgtaaaaagagtaaaaatctcttttgggtcgtggatcatagaacaattacattggtgtcacattcttaatggagtcacctgtgagttataatcttcagaagcactataaattttaattgatgattgaattcttttcaaattcttacagtctcagacacacatattcgtttactaaatatgcacatttccacgatttggactcctttatagtcagttttgtgcgaccttaagtctgttgaaatcttgttttgaccaacacgtttttcgtgatatcaaatcattgttcatgattcaccatcccaaaaagtttatatatcctaatactctcacgataacaaatttcatgctgatttatacattttgtggcaaaagtgatgccgagcaattatttagatattaggccagggactaggacattattcaatccgaaccaatttcatgaaaaaaagtcgatctgaacattagttaatattttttcaaatgttatgtttggttgttacattagtttcttagttctgcgaacaaaaatactgggaaatgatttttatttctaccttaagtgaattccttctgataagagagatcgtttagtctgatttatggcttcaaattgtgcaccagtcggagtatgtaaaatatgtatcgaaaagaaatgaattgctggcaacgtgcaagagtgaatttagtttatcgaatttttctaggcacttttggttttgtaatggttttaatttttactttgtttggttattcagcgcagactgtgtcaaaccgtagtaataggtataattttcgattcaatatatttatttttatatatttttcattcattttattaaataaatatcacacgtcctgttttctttgtttcgtttcacatctttcatttagtagcaaaaaaaaatacatggaaaacggtatacaagaagtcaattcagcatcaacatttaagaataatacaaaagatcattatagttgagatgcatactaggctcaacaatttcctaataaatcacacacatgcgcaaacataaaccacatctgtaagtacactgtatctactatataatgtacagttctggggggacatttttctactttagccaagccaagcttagggatggaatgaagtctaaagtaggatactgaagcaaaaattcttaacacatagaacatgagaacaggtacatgctgaaacgctgaaaagaggtacgctagggtgggatttatttgtgaaagaaataatctttgaggcagagtgcttgattaggttatcatggtttgggttggaaataacttaaagtttcaaactttaactcttggttttgcattttttttatcgatgatgaataaaactcgtaattattttatcgcatacttcaaagtgtctagtatatactgtaatcgtttatgaatgacttatcactgctaaatgatttatcattcatcggttgaagactaattgccttaaagtatgtgctaaacaccttgaagtttataacttgcaaactttggggaaatttgcaatagttggattttgactcaatttctatttagcgtacgataaaaagtaggaagcgaagatggtaagtgaggcatatctcaagagtcatttttgtacttctgcaactatgtcattaagatcaggaaggaaccttccttagcctagtagtaacgtctgtgacaacaaagcaaagccatggggctgtccataaataacgatagtcaagtcttacgcttgagaaaacatatagggtgcagagctacttgggcactttcatgattcactttg

SEQ ID NO: 402 - DNA, 1989 bp, Aedes aegypti
atgaaaaagtttatctccaagtttgaaaacaagaatgaggcaacgccaagcaaggaaacgaacagtttcgtggggaaaacgttcaaactgagccgggacaatgtggtgacggtggaggaagtgctggccgagggcggctttgcggtggtgtttctagtcaagggccacaatggccaaaggtacgccctgaagcggctgtatgtgaacaatgagcacgacttgggcgtctgcagccgggagattaagatagccagtaatctgagcggccacaagaacatcatcggatacattgaccatagcataaaccccaagggcaatggagtgcacgaaattctgctgctgatgccttattgcaaaacgaatctgcttacactgatgaatgccaggattccaaccgggttcaacgagcaggacgttctgcagatattctgcgatgtggcagaggccgttgcccggttacatcaatgccaaacgccgatcattcatcgagatttgaaagtggaaaacatcctccaaaacgacataggaaatttcgtgctgtgtgattttgggtcggcgaccgctcgggtactgaaccctaatacccacgggaggacgctggtcgaagaggagatacaaaaatacaccacgctctcttacagggctccggagatgattgatctcttctcgggacaggatataaccgtgaaggcggatatatgggccctcgggtgtcttctctacaagttgtgctttttcacgctgccttttggggaaagcgctcttgctatccaaagcggacatttcagtattccagacaactccaaatattcccgggaaatccatcaactcattcggtacatgttggaaccggacatcgagaaacgtcccaacatctatcaggtgtgcgaagtagcatttaaaattgccgggaagaccaacccggtgcggaacctaacgaaatctacggttcctgggttagaatttctgatcgttccaccatacgagagcgaaacgaaacgcgttccatcggccacgagctccaacgtaaaagcaacgaaacaaacagctgcctctgctctggaaggtggcacatccgtggctccacggcagagacccaaggcctcccaatcggcgaacaatagtttttctctgggactccctttaaatccttcacccaagaatatcctttcgtcgccaactcccggccctgctgtggcccctcaagcggaaccattcgtggccaaattcagcgccaatttccctccaccaccaacgcaggaaatccccaacagtaatctgtttcaatcaacctatccggacccgttccgagaagcggatgtcctccaagaagccggatcgtcccactcagtagtacacccagaagcaagcgttccaacgtgcgattcctcagcgtcttctggcaccagtgtagctggctctttgctcccttccaagcaacccatcgttggccatcggcgcaacatgagcgacacgtcggcattcaacaaagcctacaccacagaaacctctcagtttctggcaccatacgatgtatcatccaacaactaccagccgccgcagaacacgctcggaagtaacggttccgagcagaacctccattccattccggccactttcgattcacgctcctcgaatcctcagctgaacccaaccggtactcaacagcaaccgtggaatccgttcggtgatcccacccctttcagtcaaatgaccgaagaccacatcttcggcgaggagttcgataaaatacgacaacaaggctcccaaggcagtctgaagactccgccggaatcaacctctcggcatccctcactaccccaagtgcaacctatccttaaccaaccaattcaatctcttccccttcagtctcaattctccccggagaacattcccccggatactccggaagacgatcccttcagctcggcgccgttttccctacccgtccgggacaagaaccgctcgatcaagctcggttccaagcgg

SEQ ID NO: 403 - DNA, 1643 bp, Aedes aegypti
atgccgtttgtcgttgtgcaaacccgcaagaataaaaaatccaaaccgtgcatgaccgttgtgccggaaaagtgggccaaaagagaccatgtttactggccgccagcaaatttggtatcgctttccaaagatggattttcggaaccaaacattgatgtttggaaaattcagaaatgtaaggttgttggtcgtggctcgtcatatgcggttgctgaagacgtgatgcgacggttggaggcggtcacggactcggaggatgctgtacagtcaactctaggaacacgggccaatcctggcaagaaaaaggtcaaatttgtgccaaaagtgtacgaactgaaaagcagtaagaaggatcacgtaacaagccctccggagaacgaggccacatacccactttttccagtgccaaaaccgcagacgacctcacgcccagaggaattgcgtggcgttgcctccactgcatcacagcaaatcacggaaatctctcagattgaccaaactatgactcagtttgtcattcagtcaggtgacggtcggcaatatgtccagatgagtgacggaacatgtttggaaatcattgctggtgaagctaactcatatgcttcgacgagtactcaaattcaacctacaacacaaagcagtgtaatactggacagcagtaatgttatcaccgacaatgatctaaacaatgttctcgacactacgggaaatcagaatgatcagccatgttctatcgaacaaccgactcaagaagaacaaatgtgtcatgacacctcaatcatgacagtccttcgagatttgcaaggtcgggttaccagaatggaaacgatgctggagaaggtttttgctttcatggccaatataaatcgactcttcgaaaccaaactatcgacaaaaatgcaggatggagatgtgaaaaaatacgacgaagatttctccgagtttgacgatctcatgccggttaaaaccgaggaaaaactgagagaactggagcatcaattaaaaacacagtcatatgcaaacaaactttatagattcttcgaaaccgttttcaaattaaatggcaaacgcgaaggaaaaccattcttccgaaacctactacggaaatttgttgacccgtccattttagtttcgtactcgtggttgggaaattcacgagcaaaaaaaggtgaaccagccaacaagaacaagagtttcaaagacaattttccaagctttgttcaatttgttggccgtattcaaagatctgctgacttcgaattttcggcagaagacacggaagaatcgttcagccaatttctacggcagaaaaatacggagttgaaacggaaaattgcgagatctggcgctccgaaagcctcccacacaaaaaagaggcgacaacattctcaacatctctcacccagaatcgacgaaacaactgaagaaatcgaaaacggagatcttttagaacaaatcgccatcaaggaggtagacatcattccagcagcctcctacagcagttccagttccagtagcagctcagataccgatgttgagtaaaatgtacacttccatgtgtacaaacagcatgacatgccatttcttgccaatatgttaacttattgttactacttttttaataaaagaaacaaaatctttgc

SEQ ID NO: 404 - DNA, 1921 bp, Aedes aegypti
gcgtctttattcaagataaaaacatacagttctctacctacatttaatccaacttcacggaaataacaaatcttattatcatgtggcttacattttgtaccgtattaattatgctaccattactcgaagcgcaagtgattgccccgtatctggtgtcgattcggtcaaacgttcccgccgtcattgggtccattacagtgaacagcatttcaaaacaaatttgcaacggagtaatcatcagagacaagttcattttaaccaccgccagctgcttgtttgtacaagacacccaaaccggacagagccgattcattacttccggagagatatttatccttgccggaaatatcagcttgaatgaaaccgactacggagatgaagcgagaggcagccttaggcgtaatgtggtttccgtgatacccaacggaaagttcgatgcatcgacaggagaaaatgacatcgctttactcaagcttgaccgctcgctgctgccactggccaacaagaatacgagctcggttcactggatagagctggaccaacagccacgatcgaacccacaacccgccctggcagccgcagccacatcgcaacaacaccagacaacgacaacaacggcgccaactaacaacaaagttaatgaaaactgtttcataaacatttataacaactctgtcggggtgtccggttatccttacaccgttgtcaaaaatgtgagcttcctcgaaaaatggctatgtgatgctcagagaggatccctaagagcaggccaaacggtcgtaggaagaaatggaacgtgcatcgagtatcgtttcagtaatgcacaagcttgttggctcgatgcaaattccctgcggcgcagtgaagaaaggggctccgctctggtgtgcaacttcaaattagtggccatattgacggaaataaatccaccctcgaatccacaaacttgcacttcgataaaacgcaccacagcgtactataccatggttgctccatactatgattggattgtgagcgaaattggatatctttacaattccaccacctctcctggccatccaggagccatcggaaccacgggtagtaatccgacgatgaatgtccagagtggaccaacaccgccaatatcatcctggggagcccagcaaattggaacccctacgaccacaacggcaggcgcaccaggttgggaaatcggatattttcggacgctttgtttgctcaaaagggtactccttttctatccgcaggaaaaaccaaatccgcagctacgccatcaatcagccccggaattgtattcaaacttattgcctttaatttattcattccatttgcgttcatttatcggttccatcattgatgacgacgacggcggcgacggagagatttcgaaagctatcgaaatggggctttgtggttgagcctcttcgcatggtataccgttattttgggtaaaattgtacattttttggcgggttttcaggtctggtttctataatgttgtcaaagtcaaacaagtgaatacaggaaaggaagtacgaaggtgaacctcatgggcccatgaattaaacatttatggaaaaaataaacaattatatatcaagaatacgctttcaatgccaaaatgtagacaattttcaaaaaaatatcctaataagtcaattctccctaactcgatactaaacggataatcgagttaagaaagtatcaaatttgtagaacagaaaactagtactatagtaatcatgcaagggaccatggaggtagtcatgaaaacaaactttttttgactgtatctcacagaaatccaattattacatgaagctgatacaaatattaattttccaatatgtccaggaccgcttgtagggtataggggggagaggataaaaataaataaagaacgaaaaaaattgaaacg

SEQ ID NO: 405 - DNA, 1397 bp, Aedes aegypti
caaaaaatagtacagaacaaacgttcaattatgaaatttaacatgccgtaatctattaacacttgtcgcagtttttagccgcatattactcttttacactagccgcaaacacgaggcagctccaactcgataagcagagaaaacaattgcaggagaaaacaacttcaatggacgatagctggccactgtctacacaacttcttgctgctgcgaactctggtttacatttaagcacgagagccacccactatcgggctatttcccgatactttttactcgtattctctttggcactggcaatcgtgggacgccgtcatcacaaaaacgaacagtacaacacctttttaaagccgccgacgcactctcaacagcatacagtcttcgaggtttgttcggatcgaaatgtgcagaattaagcatttactagcaacggttcttattctcgtgggagttgcccacggtggacaaacgaacagcggatgcaaacactgtagacccaatcacaactgcccacagcaagacaggactctagaagtggtgttccgccatgaagaatacgtagaccgatactatcgatgcctttctggtgtggcttacgagttccagtgtccctttggaatagccttcgatcccatccaaggacgctgtcgatatgcttcggagggcgaaatcagatcctggcaagcaagacaactgatgccatgcgaaaaatgtgtgggtggagtgaagttcgtcgaacttggcgctttcttgcctcaatatttgcagtgtgtgtccgaaggaattgcagagctaaagacttgtcctgtgggacagagcagaacgagatccgtccagcttttgtggatgtcggaccactgcgaaggtttcctaacaactcgcagtcagcgtatcgaggattacccatcagctcatcatcattctaaagatgaaggtttgaagtgctcaggtggaaaacatcatcactcgtttggaaatactcatgtgcacggagtttgtccatgtgagatctgcagtaatcctgttaccgtgaaacctggttgttctacgactcctccttgcactacatctacgacaacaagtattcctcccaaaacaaccacaaccactgaaactgttactccttccaaaaccacgccgatcaaagattccacttcaacggataccactactattgcaccgacagaaactactaagaaaccgacagatattattataagtccagatgattctggtgaatattatgacgaccatattgttggtttggcaatagattcagaattattaggaagatatgggacaacaactcctaaaccaaaaacaaccactacgaagaaacacacgactaccaccaaaaaaccaaccaccactacaaccaaaaaaccaaccaccactac

SEQ ID NO: 406 - DNA, 1977 bp, Aedes aegypti
atgagtgccgtttcatctatcttcgatacgcccattccgagtgcagcgaagtcttcgccctcgggatcgaacaagcgaccattggcgcaaaatgggcaccactcgggggaaaagcagtccaaaaaatcgaagaaagctagcaagaagcaactgatcgatctcctggtgcaggaacacgcccgggaattgagccaaaacgattccagcgcttccacggtttcgactccgaagaagaaaaagaagaaaaatgcttctgcttcagacataaacactagtgcttctaaaaatgtaaatgctgccaagaaaaagcccaaagagggacttaaaataaatcttcaaaactcaaaaaagaaaaggaagaattttgaagtgctcaacagttcgcaacagcacgccgacgatgcgctagtcgagacatcattcaatggtgaatcgttgaaaaataactcgaaccattcgacacctgtctccaaaaaacccaagaagaagaacaagcaaatgcctcatccactggcgggcactccaaatctagccatcaaacaggagccccaaactcctaaggcaaatggcatgcagcgcacctcggcccaggacagtatcgttgttggtcgggagaagttcgcttgggtaatccacccgactccggtggaagatttcatgatcaattactgggaaaagaaacccctgctaattcagcgcaagaacccatcttactacagcaatctactctcgcgagcgaaaatcgatgaaatgcttcggcagaacaacatcgaatacaccaaaaacattgatgtgacctcgtaccgtgagggccagcgagagactcacaaccctgacggtagggttctccctccggacatgtggtctttctacgaagaaggttgcagcattagaatgctcaatccgcaaacctatctccccggagtgtacgaaatgaatgtaaaactacaggagttcttccattgcatgaccggagccaacttctacttaacaccaccgaacagtcaaggatttgccccgcattacgacgatattgaagcattcgtacttcaggtcgaaggtcgcaagcactggaaactatacagcccacgagaaccagccgaaatgctagcgcgcgtatcgtccccgaatttcacgcaggaagagatcggcactccaatattggaggttgttctggaacctggggatttgctgtatttcccacgaggaatcatccatcaggccagcaccgtacccggtcatcactccctgcacgtaacgatgagtgtctatcagaagaactgctgggccgatctgcttgaattgttcttcccgcatgctctagctcaggcagccgaaactcatttcgacttacggcggggaatccccttgaatctgcatcagcactttggcattgtgcattcggatagcgaaactcccgcgcggaaacaactgatctctcacattaaatccttggtcgataaggttttcagcgaagatgccattgatagtgcggtggaccaactggctaagcgcttccaacatgatgccctccctccgctaatatcaaacactgaacaatccactacagtatatggttcaagcttcagccataatcccgacggcaccgttagcctgcgggtgccgttcaccgagaacagcaccgttcgtctgcttcgctgcaatgtgctccggctggtgagcgaagaggagaaacttcgcatttactatcacaccgataactcacgtgagtatcatgagtatgagcccaatttccttgaaatcgatcaggacgctgccctcggtgtggaattgctcgtaaagatgtatccgcatccggtggctattcgagatttgccagtggaggacaagatcgaatttgccaagagcttgtgggagaagggactgattgtcgtgcatgggcagtgaaagccctgagtcgttaattgtaaatatttccattattcattgctaccaatacagtttagttgtttatct

SEQ ID NO: 407 - DNA, 3414 bp, Aedes aegypti
agtatgcttgaggaaagagcgcgaaatactgacagacccaccgatgtttacgttgttcctcagttgaatccaaacattgttcatgtcgttagttgtttttcgtggcggtttgcgaaaaaattgtgtttttcaccgatttacgtgttattaagttgttatttccttctggagagtgcgcaaaatagttatccatcaaaatggatcaatatcccacggaggaagaggaatttgagttgatgtacggcgatgacctggaagctatgaatgatatggatatcgagatgaatccagccaccccgcgtccatcgagagctaaggagaagccagcagatccacctcgagcatcgacatcacattcgcactattcccgtcctccgctggatagccccagtctctctcaaattaacgaagacagcccactgcgaagtccagcatattcagttatttccaagaactccacaaccatcaataagcgtctgttcgatggggatgggaattacggtcgcatggcttccacgccgttcccgcgattgtctcaatcttcggctacggatccgttggctgaaatccagaacatcggtctcaatacgcgaaagagacgtttggacgccttgtttggcgatattcaagatattgaagatgatggcagtgtgtatgacttttgccagcagggcaatacaaaaaagaccaagacggaagaggagcgggacatggaattgattgaaaagattctggaagccaggaagcgcttccaagcgattgttcatccaactaaatccagcgggttggatagagctgaggctttgcatcggttcaaaatgcaaaatttatcgtattcgttgccaaaatggccgtttgctactgtcgttagaagcgataaagaacgcgtctatgtgcggtttcattctgaggagtttgaaaccaacgcaattaatgagattaactgctttaaagatggctataacggactgctcggagacgccaaggaaagaatttggaaagaggctaacgacataatagccaagcgattggacgcaccagcccgagccattgcacctaacccggatgtagtcgtcgttccggatcaaggcaactcgttgtgggttgaaaagtatcgtcccaaacggtacgttgatctgctgtcggatgaaacgaccaacagaagtctgcttcagtggctcaaactttgggataaggtcgttttcggacgagaacctaaagagaagaaagacgtcaaacaattgaacagcttcaacaagaagaccggccgatttgagtccaatggaggatggaaaaagaagaatcgctctgcgctgaatactgaactggacgagcatggaaggccaatgcagaaggtagctcttctatgtggtcctcccggtttgggcaagactacgttggcgcacacgattgcacgacatgctggctatgtggtgcgtgaagtcaatgcatccgatgaccgcagtccagaggcgttccgtatagcgttggaaagtggaactcagatgaagtcggttttgaatgaggataaaaggccgaattgcattgtactagacgaaatcgacggagctccagtcgccacaatcgatttcttgttaaagttcatatcaggttcggtgtcccagaaaggcggtaaaaagggtaaaggtgaaaaaacagaaaagtttatattgaaacgacccataatttgtatttgcaacgatatgtacgttcctgctttgcgacagttgaggcagatagcgttcgtagtaaactttcctcccacggaatgcgcgcgattggctgaaaggctgctttccatcgccaagcgagagaaaattgaaacggatttaacgtcaatgctggctctagccgacaaatctgggaatgacgtccgatcctgtttgtccatgttacaattttgcagttcactgaagaaacccatccggctgaccgacgtcctgaagagtaccgtcggtcaaaaagatcgtcacaagggcctattcggtatttggtctgccatatttcagatacaacgtcccaaaaagaccctggtggatgctgatagctgcgaaagcgatgctattgtgacactcaccgatatgtctccggcaacccgaatgaccaacattctggacgtgatacacatggccggcgatcaagaccgattgatgcagggggtgttcgaaaactatctgcaccaaaaaatgcccgatccgaacatggcaggagtagctgaagcctgtgattggttctgcttcaacgatcgtatccagcaggtgatcaaccatcagcaaaactactccatctatccgtacctggcgtatggtttcgtcgtgtggcactatttgtttgccagtttagcttggccaaaaatcaatttccctaacaagggtttcgaggtaagtccgtgggggtggttggtattcttggtattttatattttctgagcgtaagaggtgttgaatgaagtcaattactgtggctattaaaacttattatatggtttataataacgaaagcgcattgcgacctgaaaggatgtaattattttctccgcttaatggggaagagtttgttggtggttattatctttgaatgggaccgtgtgcttgctttgcttcttgtgtcgcttctaattatttccttctttcatcattcaatctgcgtggcattttctaatttagtattctattttgtgcccgttatattgcgcaaaagtcgttacgttatgatggtgttgtaggtggaaggggagggggattttgaaggggaactcgtttgctgacggtaaggacgtatcatcgtcacgtacatcgtcggccacaggtagaagtgaaccgcacttttctgtctttgccctcgaggtaaagcctagtggtgggaagaagtcctttggctcgtgacacgagaagctggctgtgctacggtaggaactgaagcatgatgatgttaatagaatgcacacagtttaaacataacttacaccattttaaataattctttttgtagattatgtgtgtagcttgctaggttgtgcttgtattcgatgaatttgggacgatgcgatgccattttttgtccaaattttggaatgttggctcccctatgttgaaaaaatgttaattattgtaaataatatcctttcaagaaatctatccatactcaatttaagtatttcaaagtatatttataatattcaaaactttatctaaattcattttttacggattttcggatttggattttttagtgtcgtttcttgaagatgaatcttctaaccagtgtgaaatctttccaattctagtaacatgattttaagttgtttttatgttgtatctttagaaggtgtgcgaatattttgtcgataaacgttatgctccattgccccaagacatttttccagtaggtatgcatttccattacgaaaacatt

SEQ ID NO: 408 - DNA, 2313 bp, Aedes aegypti
tttacctgtccgcgagaccaaatcgcgctagatcttaaagcaatttcgcgcgttgaattgataagactgcctgcaacttaatcaaagcatccacatccagaaaatgtcgtccttcctcaacggtcgtacatctcgagttcaagttcaatggcaatcgatagtggtcgtgatttgtgccagcctattggccagcgtgagtgcaacaagcagatgggccagtttggtccgagccgttcgaaatgcttccacaccgatcgatttggaagcatttccgggcgagctgtgcatgagaagctgtgaggatactcaacctcgcgtttgctacttcaagtgggtgctcgagcattaccactcgatgggacccgcctgtaaacgatgcgcagacggagttcacagcgattgctatctgccggcgtgtcttacagcggatggtttcgagcgaggagtgatgtccatcaaccgtcaagtaccaggcccagcgattcaagtctgcaaagatgatctcatagtggtggacatgacaaatgccatgggtggaacggccacagccatgcactggcatgggctgcatcagagggacactccgcacatggacggggtcccattcgtaacgcagtgccccattgagttcatgagtacctttcggtatgctttttgggcgactgagcctggcacacagttctatcattcgcacgctggacatcacaaagtgaatggacactacggggccatgatcattcgacagccggaagtgaacgatcccaacgcgaaactgtacgattttgatcttccggagcatttgattgtggcatccgattggatgcacgtggacggagaaatgtacatgccgggtcttcccaacggcgatggcatccttccggtgaatctcctaatcaatggacgaggcacgtggctgaaacacaacggaaacaggacgaacgctccacgggaggtgtatcgagtgcgcaagggtggccggtatcggttccgtttcatcaatgccgccagtcacgtatgccccctagagctgcagatcgctaatcacacacttgagatcatcgccagcgattcgtacaatttgcagcccatcagtgccaatacacttgtgacgacgtctggcgaacggtacgactttgtcgtgaatgcagaccaacccaccgatgactattggatccgtctacgggcgatagggccatgcgactacaggcaaatcagccaggttgccgttctgtcgtaccaaccgatgagcgtccctgaggaggacattgctttcacggacaaagagattccccattatcaggatcagctgtttttgaacgatgtgtatgtaaatcacccaaacacaacttgtggagtctcgaaaccagacgtttgcatcacggatttccaagcgtatgagaccgatgatgacgtcatcaacggtgttccggatatgcaatttattctaggatttgaaaattacccgatgaaattcgaagacgctttcggcatgggcagtcacgagcatttcatgaacattcacgacgacatcgtcctccagggggccatcaacaacatcagcttcacatatcccccgttttcgctgctcacccaaacggatctcatcaccgagggcatgttctgcgacgaagatagctggccggagcgttgccaaacccgcgatcactgcacctgtatccaccggttgaaaattcctctgcacgccttagtcgaattgtatattctcgatttgacgccggaagtgaacgatctgaatcatcccttccacttgcatggctaccaaatgtacgtcatggagatgggacaggaccggtcaacgcccatcacgatggaacgagcccaaaagattgctcggaggcagtctctccaccggacacgagtaacaactatgccccccaagaaggacaccgtatcggttccgagcaagggctacacccgggttcgattcgttgcggacaatcccggattctggctgatgcactgccactacgagtggcatacggccgttggaatggtgctggtgctgcaggtcggtgaaccgggcagcttcgtcaaaccaccggccggatttcccacgtgcaacaaatatacgccagatgtggacgcgtcgctttttgatgcgtgattttggcgttgttatttattggttatttattggtgtaaggatctgagattaaattctagtcatttgttgcgaacgatgtttttgtacgaatgtacagaaattttagacaaagtagaaatcgaatgtttgtgttgagaaaactgctggttttgttttcgggtttaataaataaaatgatttgaaatata

SEQ ID NO: 409 - DNA, 807 bp, Aedes aegypti
atgggagatgtcagccgccgttcggatcggattgcgccacccgccattatcacatcccgcgaattcggagtagaattccccaccaccaggatggagcaagttcccattgcggtacggatagagaaggaagaatccggtttggctgaccgtatcagagttgacaaagcaaaacgggcggaagaagcttttggaggcctagcttcgtggaccgacaaagatttaaatgattttttgactatttgtaaagatgataaagacaccgatgatgctaattctgaagacctttcggacaccgtaaaaggagttcagttgcttttgaatgacggccacgaagttgaagacgttatccttcttcgagatcaagaacaagaagctcgtgatggtaaattcaacaacttttggaaagctgttgaagctgtgatatccgagaacgatttagctgttgctcaggaaaggcgacatgggaccactagttggatatctcctctttgtgtctccctacgcgatctgatggaaaaaagtgaagagaaaatgaatcaactttttccagaatcgttgatgaacaatgtaccctcaatggaattcttccgtcttcaattctctcccagaaactcacgtaccaactcggctaaacgatactacagcagatttgacataaaatatggactacaaatacgtactttgcgaaaatcacatccggatcagcattatggagcaaagcagttccaatacatgaaaattatggcagagcttgttgctcgctactcgaaaaatgatcttgaaagaccaatgctgttcattggataa

SEQ ID NO: 410 - DNA, 2922 bp, Aedes aegypti
cacgaacggtccagaatggaggaagtgcatcaaccgcaaccggctcatttggcagcactcgagtcgcactttggccattccaactttcggcccatgcagtggaccatcatccgctcgatcatcgaggaccgtcgtgacaattgcgtaatcatggccaccgggtacgggaagtccctgacgtatcaatatccttcggtgttcctccagaggctgacgctggtcatttcgccgttgataagtctgatggaggaccaggtgctgtcgttgaacttgagcaacattccttcctgtttgctgggatcggctcagcgggccaatccagttccggatatcaaggcggggaagtttcgcgttgtttacctcactccggaatacgtaaccggggagagcgggaagtatctgttggaacaggtggccaatcagctggttctgatagccatagacgaagctcactgcttgagtaagtggggacatgatttccgaccggcttataggaatcttggagtgattcgaaagtggtgtccccgagtgccgatactggcggtaacggcgacggcaacgccaaacgtccgagacgacattgtgaccagtttggggctctggaatcctcaggttttgtgtaccggattcgaccgaccgaatttgcagtttcacgtcaagatgaagagttcgctcggaatttgggaggacgttaaagggctcctcagccggaacgtcgaggggagcatcataatctactgtctgacccggaagcagacggaagagattgtggagctgctccggagcaaaaagatcgactgcgaaccgtaccatgccgggctcggcttgaagcagcgcagggaggtgcacgagagtttcgtgcgggatcgggtgcaaatcatcgtcgcgacgatcgccttcggaatgggaatcgataagccggatgttcgcctagtggtgcactacggcgcttcgaaggatttggaaagctactaccaggaagcaggtcgagcgggccgagatggacaaccgtcgaagtgcgtcatgttctggagtcgagcggatttcaagactcatgaaattcttcgagagcacaaccagggcggagttcagaaaaatctcgaagcgctatcgaagaaaatgtacgagtaccttgatacgcgggattgccgacgaatgttcatcctaaagtacttcgaaggagacgttgtaaaggtagatcctcgtaaaaactgttgcgacaactgtgatcgaattgtgggtggagttaaggatagtgatcgctatgaaggaatcgatcaggatggaaattatgattttagtaaagacgcggaacaccttctgaaggcggtcgaagcttttggaggtggaacaggcctggcacttccgattgcgttgctgcgaggttcgaaaagcaaaaagcttcatagttcttatttgaagaatcctctacacggaatcggaaagacaaaggacgacgaatggtggaaggcactggcagtgctgctggagagagaaggattcctggccaagactaaagtaccaaacaccttcaataagtttgcagtcatctacaaaataggctccacgcccttggcgaagaaatggctagcgacaccgaaccggaagttgctgatgaaaccaactacggagatgttcaagtcgatacggctggtgagtaccgaggggcaagttcgcactcaaccactgtttgacactggctcggatttccaaacgcagagtaaaacaacattcccacctcagcttcaagcaccgggcagctctcgtcttttggaacccattgcccagaagcaggacattgtgcaggaactcgtgaaaactcttttgaaaaagcgttcggaactggcaacggcttacgagtgcatgccgtacatgatcgcatccaatcaggccctgcaccagatggcgaccatcaggccgttgaatctcgatgagatgaaacgtgccaaactggatggtttctccgacataaagatccagaagtttggcaaggagttcctcgtctgcattcagcaaaagttaaaatatattcccgaaacgagtcaaccaaatactcctactcaagtacttcaacagcattcccttaccaaaactaaattctcctcgactcatcagactacttggaatctatggttggaaggacgttcaatatctgatatcgcaaagtttcgcaatttagcagaagggaccgttaccaatcacttggccgaagcgatcaaacattggtttccctttggtccgaaagacttgtcgcggatgggcatagatcaacgcttatacgatcacatcaagtccaatctaccgccctctttggaaggctgcaaactgactgacgtcaagaatcgctgtctaccgcatgtgaccttcgatcagataaagattgtactgagtcacgttcaggtacgatcgcatctcgaagcgttgaacgtccccgcaaacgacaacaatgcccatgaggagccccagaaaccacctgagaaagaagtggaccctacagcacaacaggagaatgatctttggggcgatgaggacgacgacttcatagcggcagaaagcagctttgcagaaattgatcgaatctgcgaggaatccagtactaataagaacgaaggcgtcaaacagcttgatgccacaataacatcgatcaacgacgaagacgacgatgaaggtttcgatatgggtgaaatcgacgcgttggaacaagccgtgatcaatatgagcgatcgttctggtacagaagctctagaaccgtgttctgaaccagaacaaccaaagaagcccaccctgaaggccaagtcaaggagaattctctacgacaacgacgatgatgaggaggagcactgtccgcatttacgacatctgtttatcaaatataccaagcgttgtgctcacttctcgttcaaccattctttgccacattag

SEQ ID NO: 411 - DNA, 2571 bp, Aedes aegypti
atggcagaaaaatgtatcgtcacgattaaggaagagcagcagcaccaacagcaatgtcccagccctctgggggagataaagaatgattctgtgacggcgttgaccggtacacctacgacgatcatcactagcagcatcccatcagcgacgaccgcgatcagtctgccatcaacgacgacggtatccgcctcttcgactcccacccaatccggcacgatagactgcgacgacgatgaccaggaagagaacggcggcaaaccgcgcgaaaaaggttgctatgcgtggttctattctacaaatcatggcgtcgttgttgggcactctgccggaaaccagattcatctggaaacaccagtgctcgaggaaaaaagcaacggtggcatgaatttagcgaaaccaaagcgtctgagcgatgagttttactctgccgacgatgactacgacgaggacgacgacgacgagatgattggtggcggagaagatggaggcatcggaatcagtagtagcagcagtggcagcagcagtttgaccggaatcagtaaaagtgttggaggtgacggagattgcgaagcgcacgctagcttaaatgagattaaaaacctgagtatcacgaatggtggtgctgagcttggtgaggatcgatatgaacaggatgaaaactcgatttccgatccgatctatatcagtgaggaaacttcgtcatgtagtagcggtcaccaacggatcatagctgaagaagcttccgtaaaagcacaggagactgaagagccaagtcggcaacatccggaacagcctttgggaatggagcaggaggaaatcccagaggacgaaggtgttgctgcgctggaagataacctcgaggacgatgaagatgacgaggtggatgaggatgatcctcatgatgtgcaatcaatcgatgcaatcgaacgtcgggattttgagcaggaacaaaaactgactggcggaattataattaaaaatagcgctttgatacccgataaccatagactgaatttagaggtaataaatagttttagtaggaaccgcaacgatgcattggcgaaaaaatctcagtctgagagcggcaaagttcagcttataacaacgccaactagcagtagacacgcgtacaagaattgttgtaataatccatctagttctaatagcactagtaatagggaacaaaacagtaatagtacaacaaagtcaacggtaaaagttaatctgtcagctagtctagatagctattgtgcagctagtgaatccgtaaatggaccggatatggctgatgggccttcctgttcttcctcaatggcttcgtcctcgtcttcttcggcctccagtagcagtaagacgcataatcgccaacaacagcagcaattagatgcgatcttcaatagtaactccaatgatagtctatcatccgatcgttctatatttatccccaacctgcaagctctgaaagcatctgccaaggattgcccaacagctcccagcagcagcggtgtcaatgagccaggaacatcatcttcctcgtcgtcatcaccatcaccttcatcagcaagctgttccgctggtccttcaacttctggagcaaccaaagcaccatccgactgtagtttatcgtcttgtgcaacatcggtcataaagcaaacaggagaatgcagcaaaaacatcaaccaccatcccattccctcaactagtactagtagttcctcgctgttttcctttagctgtccctttggaagcgcggatcgtgaaaccggcgaaggatgtagtaacggcaatgtttccctaagaagattcccttcgaatggctcgaattttgccgataacattgccgatgaagtggaaccttctagttcgtctcaccgtattcgccaaccacaacttcatcacgagcataatcacatggaggatcccctgttggaaccttctgaactatcgatgccaccggagctagccgcttcggcatctgtcgtcgatcacgaatgcgacgaagacaactgggccgattgcgaagaaggctccgacgaagaaatatgcacctgccgagattataccgatgatgaaggaaacggcactaccggagccggtggccatgctagcagcgaagacgaactgccctccagggacgttgatctatcgagctttactcacatggatgccgctgaggatattcttgctcatgacccgagtaccggtgggtccggtagcgcggccaatactagcggaaacaacgcacaaacgccaagactgcatcggaagcgcaaacttaccgaaaatcgcattctattcggaagcggcggcagccggacttcaacgggaggaatgtcggagaccaccggtgggctgggtagccattgcgatagccctagtacggaatcgctcaactacaacagccgcaaacgattagctttagatagtaccagctcgccacgaacgcttgcttcgacgcccacgacatcttcagcgctgggagaacggaagactccccgaagtgtaatccctaccaaagataatcctcctcccgaactgaacgagtggctgctgcaattccaggtcagttga

SEQ ID NO: 412 - DNA, 755 bp, Aedes aegypti
tacaaatgtcaacattgtaaaattagcagtaatggtgacggaaaaaactcgcgcggtagctgttttttgttaattgatttagaatttgtttttcgtatttgactacaacgattccagccaacacaggggaaagagctgcttatttcaataaatacaaacgaacgataatcattaggaacttctgttttttctaccagagcaagtttgttattatgttgattctagtgacaatcaggtgtccgttgttcacaaaacactcaggactatgtgatgtgcccattacggtgccaaaaccgtcagatatcggcacctttttgcgtttatttctcaaagcgagtatggcaaaattcgtgaagttcatgactaaaacaacttgcccactgctgctccgggtgttctgttcgaccggaaggcaccactcatcgaacgaatacaaccacggaaatgtcccctcgaatgagctgcagatctacacgtggatggatgccaccctgcgggaactaacaaccctggtgcgagacgtcaatccggaaacccggcgcaagggaacctacttcgactttgcgatcgtttatcccgatcgtgggtccgtctatcgaatgcgtgaaatcggcgtgacttgttccggccagaagggagcggacgacacgaagacactggcccacgcaaagttcaccatcggagactacttggacatcaacattaccccaccgaaccgtttgccccctcgcgggggaaggccacgaccctactag

SEQ ID NO: 413 - DNA, 1484 bp, Aedes aegypti
gcgggtgttctgttttcttgcgtagtattcactttccggcgatatttggagccccacgggatgatttcggattgaccaacagaagccctaatagtgagaacaagccgccacagccatggaggtcgacggcgagacgcaaatcgaggagctggagtgcgacatccgaacgttgcgaaagcagctcaaagcgaaggttcaacagctgaagaccttgaaaaaacattttcagaaaaactgcatcaacaaattgaacaacaatgaaatcgctcgctacagtcgccagatcattctgtccgaaatcggcgtccagggccagctgaagttgaaacgatcttccgttctggtagtcggtgccggtggacttggctgtccctcggcactctatctggccggagcggggatcggtcggattggcattctggactacgatgaagtcgaactgaccaatctgcaccggcagctgctgcacacggaatgctccgtgggcctcacgaaagtcgaatccgttcgatcgtatctggaggaactcaactcacagatcgaaatcgtaacgcatcatatccagttgaccagcgacaacgccttgcagactctggagtcgtacgacatagtggtggatgctacggacaacgtggccacccgatatctactgaacgacgcttgtgtcctactgaagaaacctttggtttccggcagtgccttacagctggaaggacagctaacggtgtacaattttaacggtggaccatgttaccgatgtttgttcccgaatccacctccaccggaaacggtgacaaactgtggcgatggaggtgttcttggagcaatcaccggagtcatcggagcgctgcaagccctcgaaactatcaaaatcatcctcggtaactcgggagtcctttccggacggctcctactattcgacggccaccagagcaccttcagaaacctgaaactgcgaccgaagaaggccgactgcgcggtctgttccgacaatccctccctcaccaagctgatagactacgagcagttttgcagcatgaaagccaccgataaggactcgcatctcaacctcctggcgccgcacgaacgcatcaccgtgcaagaatacaaaagccttgctgaaagcaacgtgcctcatcttctcgtagacgtacggggtgcgaatcagttcgaaatctgccaacttcccgcatcgataaacgttcccatcgatgacattctgaagaaccgacggacggccgaagtgacgcaactggccgcgactggaggtcccgtatttgtcgtgtgtcgtcgaggtaacgattcgcagctggccgtgcgtcatctgtcgcaactgttccaggagcaagggttggcaccaccgcgggacatcgtcggaggattgcacgcctggacgcacaatattgatccggaatttcctatatattgattatctgggtgggaagaatatacctatatgtacagcgaaatgtacgaaaaatgta

SEQ ID NO: 414 - DNA, 1839 bp, Aedes aegypti
atgcgattaccaataatattgtcacgttcccgaggagttcctgtactaacacgtcaactcttcccaaaatccccctcgcttatcatccatcgcaccttcaacgactccaacggcggcctcataatgccgggtcaacttcgcggctacgaccacctgcgcgaacccaggctgaacaaaggcctcgccttcaccctggaagagcgtcaatcgctcggcatccacggtctactcccggcgcagattcgcacccttgatgaacaactggaactgtgccgcctagcattctcccgctacaaggaagacctgcacaagtacgtctacatggtcgaactgcacgatcgcaacgagaagctgttcttccggctgctcaccgaagacatcgagcgaatgatgccgatcgtctacacgccgacggtggggctggcctgtcagaagttcgggtttatatttaggcggtcggtcgggttgttcgtgacgatcaacgatcggggacatgtctacgaggtgttgaagaactggcccgagatggacgtgcgggcgatcgtggtgacggatggggagcggatattgggattgggggatttgggcgcgcaaggaatgggggttccggtggggaagttggccttgtatacggcgctggccggggtgaaaccgcatcagtgcttgccggtggtgatcgacgtggggacgaacaacgaggagtttctgcaggatccgttgtatattgggttgaagcaaaggcgggtgaggggtgaagagtacgatgcgttaattgacgagttcatggcggccgtggtgaagaggtatgggcagaatacgctgattcagttcgaggatttcgggaataagaatgcgttcaagttcttggacagatatcggaactcgtactgtacgttcaacgatgacattcagggaacggcggccattgtggtggcagggttgatggcttcgcagaagattgtggggcggagcatgtccgaacacaagtttctgttcctaggagcgggtgaggcagcgattgggattgctgatcttctggtgagagcgatggaagctgacgggattccggaggatcaagctcgggagaaaatttggatgtttgacaagcaaggactgctggcgaaagaaagagaagaaggggagctggaaggtcacaagatccggtacgctaaagacaaatgtccgaccaaagacttcttggaggttgtcaaaaaggtccaaccgtctgtgctgatcggagcttcggccgccacaggcgcgttcaataaagatgttctcagaaccatggcagactgtaatgaacgtccgataatatttgccttatcgaatccaacggccatggcggaatgcacagctcaagatgcgtacgactttacggatggtcgttgcttattcgcgtcgggatctccatttccaccggtggaattcaacggaaagaccttcgtcacaggtcagggaaacaacgcgtatgttttcccgggagtggccttgggggtgattgcatccggaatccatcacatatcggacgatatttttctgaaggctgcggaggtcgttgccaataaggtttctgaagaagatttgtccaagggattgctgtatccaccgttgagcagcatcaagcaatgctcgattgaaatagctgtcggtgtgcttgaatatgcgtaccaaaaaggtatcgcgtccagatatcccgaaccggaagacaagctcgctctcataaaatcccatcaatacagcttctgctacgaacgatctctccctgctacttggcgatggccgcaaaaccattgcaaaccccagggaatcgttaaggacccatgttcaaatgattcgtga

SEQ ID NO: 415 - DNA, 3992 bp, Aedes aegypti
gtcatcaagagtgaaccggttcacccgtctcgttgagaacatttttagcagaaaaaagcgagacattgcaaagtgcgagttttgtgtgtggtgccgcagtagcagcagagaaaaaccattgtgaacctgcaaatttatctcctttggagtctgaaaatcttaacagttgcctcttcatcaaccaatctacgttcggacgtgtattccgctatctgcagtcagtgaaatcacaccgaaaagatgccttccagcgatcctttgcctcccaaggagagtgctgtgttccgcaagattctgaaatgttacgaaatgaaacaatacaaaaatgggctgaaacttgcgaagcagatccttaccaatccgaagtttaccgaacatggggaaactctagcaatgaaagggcttaccctaaactgtctcggtcgaaaggaagaagcgtacgattacgttcgccgaggtttgcggaatgatctgaaatcgcacgtctgctggcatgtgtacgggttattgcagcggtcggacaaaaagtacgaagaagccatcaagtgctaccggaatgcgttgaagtgggaaaaggataacatccagatcctgcgtgacttgtcgctgctgcagatacaaatgcgcgacctggagggctaccgagatacccgccaccatctgttcaaattgcgcccgtctcagcacgcttcgtggattggttttgccatgagttaccatctgctgggagattacgaaacagccatgaacattttggaaaccttccgggcctcgcaaactgtggaaacctacgactacaagcatagcgaactactactataccagaaccaagtgattcaagaatcgggcaactacgagaaagcgttacaacacctgaaagagtatcaatcgcaaatcctcgacactctcgctgtgaaagagactatgggtgaactgtgccttaagctcgatcgccatgaggaagccgttgggatttaccaagatttgatcaagcgaaacccggaaaatatcgcttactatcagcagtatctgaaggcattgcaagtagaaaagggatccgacgtgattgcagcgtaccagaaaatacaaacggaatatccgcagtctttctgtgccaaacgattaccattggatgtggccgaagatgaagcgttccgctcgttgatagatgaacacctacgacgaaaccttcggaagggtgttccgcctctatttgttaacctgcgctctctgtatcgggacgagaaaaaagtacgtgtcataacggagttggttgaaggctaccatcaaaatttaaccagcagtggttacttctctgctgctgataaggaacaaaacttacccaaggagccggcttccgcattgctgtggactcttttctatcttgcacagcattatgaccatctgcgtgaatcagaaaaggcattagacttcataaacgcggccatcgaccatactcctaccttaatcgagctcttcgtcaccaaaggccgcatctacaaacacgctggcgatgttctggaggcagtcaaatggatggacgaagcacaaagcctcgacacggccgatcggtatattaattccaagtgcgcaaagtacatgttacgtgccaatcagatcaaggaagcagaggagatttgcgccaagtttacaagagaaggagtttcggctatggaaaatctcaatgaaatgcagtgcatgtggttccagacggagtgtgccctgtcctaccaacggttggaaaaatggggcgaatcgttgaaaaagtgccacgaaattgaccgacacttctcagaaattattgaagatcagtttgacttccatacgtactgtatgcgtaaaatgacgcttcgttcttatgtaggtttgctgcgattggaagacgttttacgaaggcatcctttctactttaaagctgccaaatgcgccattgaggtctatctccgacttttcgataaaccgctaccagcagaatctgctgaagaagaactcgatattgaaaacttacctccatctgagctgaagaagctacgcaacaaacaacgcaaagctgcgaaaaagaaggccgaacaggaaaatgctcaagctgctcaggcaaaccagaagaaggaccaacacaacaagcagcgtaatccaaaccaggatggcgatccagaagcacctcaattggatgagctgataccagacaaattggcccgtccggaggatcctctcgagaaggctatcgagtttctacgaccgctacaacagcttgccaaggaaaacatcgaaacccatctgatggcgtttgaaatatattgccgtcgaggcaaactgttgctaatgttgcaatctttgaaacgggctcgttccattgactccaataattcaacgttacacagctgtcttattcggtttcacaagattttagaaagtaaaatcgccagcaacgagttagacgaaacagtgaaaatggtcattgaccgggaatgggagaaactattccgaggatcgaagtccgctgctgagatcaacgatggctatctggcagcaaaccgagacaacgccgaagctagatacgaagtcgccaagattatgtaccaactagatgagaaaaggcagaatgaagcggtcaaattgcttacatctgcagacctgaaaaaagtgacactggaggatgcgacgaaagtatttctgctactgaaatccggattctttggaggcctagctgaggatcaaatagatgcgttcaagaagagttgccagaaacgattcccgctggcggtgatttttgccgatgttgtatctactgttgccactctcaccactacccaatcatcgtcgccgacgtcctcagcgacagtcaccaccagtgctaccggaacgaccatgtgtcccgttgagcaacagtcaaaatctacccctcaacagcaaagcaaatcgagcgaaataaaagcaaactaaccgagtaaaaaattcaaaaagctggtaccgaaataaagtatgggagtcaagttccgccgctttcgctgtcagaaaacagcggactacatcgtaatagagtgacagtttagttttttaatcctattcttgggaactattttagctctgctaatgagagaatatcgaaaagaatttctaacgagatgatcaaaatagtttacatagttaaacagtcaggactaagcaagaacaaaatattgaactgtcggccacgcagtcatatataggatcgcttgcattgagtgcacaatatattaattttgtttcgtttcaattgtagatcactaccaccattatacatgagggaaggctgaatgttccctcacatttgtttttagtacacgaatatattaaattgaacacagataatgtaacttcgtgtcatgtcccatacttttttgtgactcaaccttgattctcgtgcatataggatgcaggggttgagcgactaaacatttctgtaatatagaaaatcataaaatacaaaaccggttgattttcttttcatcgttcctttatgtataatacacagaacgtctctaccactcgattgtcaagggtaaattcggtcgacttgaactgcattgaattggagtttaccctaggatcatacgcaatcctcgtagtcagcctaatcacaatccctgcaaataaattcagagtggaataatgattttcgtgataacaacacacaactaacgtatgaattaagaaacaggttttgttagctagcaaaaggcaaaagatccgtacgaagtcgtttttcaaatacacaaacacaatataatcggatgaccggaaacagcaaaataaatcagatgtgtgaactcgaaatccggatattagaaggagcttagaaaatgaagttttcttgtttggtaacggctaaacatatccgaactccaagttttccgtctgtccattctctccattcgtcggtgcaaagagagcaaccatgaatggcatgagatcagttggtataaagtcgttaaggtgaagatgaatcgaag

SEQ ID NO: 416 - DNA, 2532 bp, Aedes aegypti
atgacgcaaaccgtagtcgaagtgcactggttcccgaagtatccggatcgtttcctcacggcggccggatcggagatcaacctttaccaggtcaaacaccgcgatctgatcgaccatagcatccaaaccagtaacaccactgccacattgattgcctttgagacgcgctaccagtttatccggtcggttgctccgtccttccactcgacgggggagattctgtttgcggctgggttgcccaatgggaaggtagcactgtgcaattttgccaccgagaacaatgtggaattcacaccgagattatcacgtccatgtacgtgccttgcttggagtgagctggagccaagcctactggcgatgggacacgatagaaatcgttccgatcattgcattacaatatgggataccgaacgaggcgttcccaatcaatcctctatcctccagttgatcgggttgtcggagacggcacattccatctgctgggataagacgtttccgcaggttttgatagccggaatgagccataagcacatcaagatgatggatttcagacaaaatccagccatcgtaacgttggccaacgcccgaaccgtcaacggactctgcatcgctcccaacggtcgctatctgtccagttacgtggataacgtaatcaacctgtgggatctgcgagcgctcgagaaaccaatcagccagatccaaatgcagaagaatatcacccacttatcgtggtgtcccacgcgttcatcggtcctcaccacgctccagcgagactcgccgttgatcaacctgatcgatctgcactggcccggttcggaatccgacggaggggacccccattccataaaacggttcgttactccgttccaagcgagggccaccaatcgcatgccgaccatgggatatctttcgtggcatccgtacgatctggagcggatgttggccttgtccggaacaggaacgatttgcgattatcgtattccgcagcgagtggccatcgcctgggataacaacaacaatttgtatgggaacgatggatgtgaactgcagcagcttacatcgccttcgccgtcatcgtcgccaacggattccttgaaccagtgggattgcgggatcgacagctacgaggaggacatcgccgaaacgattcagaagagagcgctcaacaattatggcctgacagcggaaatgcaacgaaatggggatcttgctggtaattccaatctcaaaggcgtctggcgactgctcggccacatgatcaaggaggactgcaagctgggcttgaacacgatcctcggagtctgcagtgctccggatgggccggctatgtcccgttccgacccggtcatgatgaagtggctggatttcagcatcggaagtggcttggtcgtttatcgaagcgaacaaagagatacggctcaactgctctgcggatggacattcgatcggagcaaggaatcttcgttcctgtccttcatagaggaactctgctcaaacaaagaatacactcgggctgccctgattgcttgctttcactttcggatcaagcaagccatcgaaatcctcagctgtggagctgaacaaccttccgacccgacttccctgctccgtgtagctgccatagccctgtccgggttcagtgccgagcgttccggcctgtggcgaaagcagtgtggcgctgctcgaacccaaattgatgatccatatctgcggtgcatgttctccttcctggcgcacgagaaggacggcttcgaaaccgtgaccaacgaaggaaatttcctcagcgatcgcatggcctttgcttgcaatttcctttccgatctaaaactcgcagagtacatcaagggaatggttgccaactgtatcgagtctgatttgaatggccttcttctcacaggagccaccaacgacatcaaactgctccaaagccacctggatagaaccgaggatgttcaaaccgtcgccctgatagcagcgcgtttcctcacttctgatttgctaaccgactatcgcgttcaatactggatttcaacctatcgggaccttctggacatctggggcttgtgggagcaacgtgcccagctggacatcaccctgggaagaattcgctcacccccgcaaaattcccgctcagttttcctcctgtgcaacttttgcggcaagaacgtctcgatggccctgcaggaggatgcccgggtccggagcaatgcggccgtcatgcataagctttcgtcttgcccgaactgtcggaagccgttgccgcgttgtgcgctctgtctgctgcacatgggaaccacgatgggtgccatctcgcagggtcatgccgcccaagggcagatcgggtggcaatcgaagccgttctcgaagtggttctcatggtgtcagacctgtcggcatgggggtcacacggagcatctggcggagtggttcaacgaaaatacagaatgtccggtgacgtcctgcaactgtaagtgtttcgccaaagatctcccgatgccgcagtatccgcgggagaaggacatcctgtcctga

SEQ ID NO: 417 - DNA, 1049 bp, Aedes aegypti
ttatttcagttattgtgttcagttcattgcgtggttcagtcactgtttttccgtctagactgaagaaattttttgagaagctgttccactcttctatttttgtaacatggattctgatgaaggttctatgtcgcagcaaaatacgtctagtcaagcaggtgaagtaaaacggggaaagaattggagtgaagacgacgatgcacagctatgtctgtcgtggatagcaatttctaaagattctatcaaaggaactgatcaaaacaaaactaacttttggacggctatcaaagatcatgctgggctcaaaagtgtaggtatccgagaaaggccagtggacggattgagacagcggtttagtcagttgagccaccaggtctcaaagtatgttggctgcttggcatttgtaagccgagcgaagaagagtggggaatcttccgaagacaagtttcagacggcccgtgatatgttcctcaaggaaaccaaacaaaggcacttcaaaatcgaaaaatgctacgagatattgaaaaatgagcctaaattccaggtacccagcagcaacaaacgaatcaggatcgatgtagaaataaagcttgtgcgtagatcctgtagaaaactgttactgtcagtagagaagaaaccagtacaccctccccagatcaatgccaatatgtcacggaggaattaatcgagcaagacttgttttcgactcctaccacatcacttcgaccgattggtcgtcataaggccaaacgacttcaagatggatccaacgaagatatttggtcaaaagtcttgatggaaatgcaacgtaaaaatgaactgctcgaaaagcacacattggcccttgagaaggcgacagagctgcagttactaacaacacctttacatcaacttgacgatttaagcaagaagataattgaaatgcagaagaaagaaatagcaaagaagtattttgatgaagaaaatgtaaccgatgaaatgtagatgaatgtacaatagttggaagatgtataagcgacgaaagaagtattacagaaagatataacatt

SEQ ID NO: 418 - DNA, 1683 bp, Aedes aegypti
attcgaaaagtgaccgtgctcgagagcagacgtgtgtatctgtcgtccatgtcgcaaagcggcgtaccaacgccatatagaaattagagcccaaaagcgtgaaagtatcgattttccagtgtgaaactgcactaaaaacagtgcaaagtgtatagcgagccaacaaatcacacgccacaagatggcggacgacgaacagttctcactgtgttggaacaatttcaacacaaacctatcagctggattccatgaatccctcgtccggggcgacctggtggacgtcacactggccgccgaaggtcaactagttaaggcacacagactcatcctatcagtatgctctccgtacttccggaaaatgttcacccaaatgcccgccaatcagcacgcattcattttcctgaaggacgtcagtcattcggcactgaaggatctcatccagtttatgtactgtggggaggtgaacgtgaagcaggatgctctgcccgcgtttatcagtacggcggaagcgctacaaattaaaggactgactgaaacgggagaaagcgcacccacccatccatcacccgccaaagaagcctcccacataccgtcggcgagttcgacgaccattccatctctggcgtcgtctccgcgggcgaaaccgatcgtgcgaagtcggatccagtcgtacaaactcgactcggacgacggaagcgatcacgagaaaatagtacaaattcaagccacctctacccctgcctccgttgccagcgccagcagcagcacagcgaccacccaggtcagtgttccgcagcaggtgcaaatcctccaacaacagaccccgcaagcccagaaacgcaccctccagcaacgagcctcgatcaccccgcaaacgacccagatcatgaaacgagccaagcttaccgatccgcttgaagcttccgaaccgacacagatccaaactgttcagattgtgaagcaaatcgcgccgaccccgcagccctcggtatcctccgaaccggaatacgttgaaatgccaatcgaaacgatcaacccgaaagcggaaccggaatatgcggacgatccctcagaggtcgaagcgatcgatacggaacacgaacaggaacaatcactagcggaacaagaggcagcggaacacgatcaggcagaagacgattcggcacattacgttgaagacgaaacgtacggtgatatgagcaaatatgacgaaacatacttcgcggagggtgacgacgctaaggctggcgcttctgggttcagtgaatcgtacgcagagagtggcaccggagcggaccaggcagcacaagttctaggctttctccaacccggaccaaccaccatacacttccacacgaccaagcgcggatcggttcagctggaaatcgatggttaccgcttcacgcggatgaaagtgctgcaaaccaccatccactggtcgtgcctgcagacgaaggccctacgctgtaaggcccgagctgtaactaataacgacctgcagggcaccatccgacggtacctcaaccatcataaccatccgcctagtatgcggcgccgtcagcatggggatttgcagcgaatcaaagatgaccgtatggctgttaattcgatgaggcattgaattggtgatatgttacccacgtatagcaattatttcgacggaataaaaccttgttacctatt

SEQ ID NO: 419 - DNA, 1602 bp, Aedes aegypti
cgacaggtgtgagagtcgttctcttaccgagaagtctgtcgcgaagtgtgctaagctgctcaagggaagtcattaattgaggtcataattagagtgtctattaaataacatacatcaggcgtagcccacgcgaagagaatccaaaatgtcgttcaagaaggacctggccctgctggtgaagccctattactgggtcaatatcctgatgagcatttcctacatcgtggccaagcgaatgccgatggtttgtaactttttatggacatatttgttcaaccaggaccagtgcgagttggacggtcgcgaaacggagattctgttcttcctgctcatcgtggtcatgatccggacgcggaaaaccggaagcgtaaccatgatcaactacctgacgtccagtttcatgtacacaaagttggccaatttgggcctgtggttctacagtgacatccgcctcgggttaatttacggagtgctgttcattctggtggcactgatcctgccagaaccgacctactccggaccggaaaatgtcacctatttccgactggagaatggcctcgaagacgaaatggaaaaggacaaacgggtcaactggttggtcactttctacaccgtttggaatccggcttgcgtaaatttcgcgcccatttttgcggaactgtccgcggaatacaacctgcccaacttgcgattcggaaaggtggacatcggaagattccccaacatcggaaagaagtatcacgtttcggacagttctctcagtcgtcaactcccatcggtcatcctgttccggaatgggaaggaagtggcccgaaggccgtatgccgatgccaagggcaaactggtcaagttcttcttctcagctgacaatgtgaaggcggccttcgatctgaacaacctgtacaaggagtgcaaggagaatcccatcaagggcgccaaggcgattacggccagcgagaagaaaaagaactaagctccggcggttccagtccagttatgttacatttgtagaagcatttaagacgcgtcaaactgcccatcacactcctgtctcatcatctttatcgcaatcgaacggttgcacatctttatctcaacgccatcgaaatcggaacacaaacacacaacagtcattgatattaagattaaaagaaacgagtccagccccacatcgtcgcgcacattttatacaggggttaaacaaaaaggttgagataggttcaaaagacatacgtcgtgatgtaacctgcacgaaatcgccagcagcttggagaagtgttaattacattgatgaacagttatcggaaagcaaacgtcgcatcgtccgcccctttgaaaatactgataagaagaatgattgtcttttgtgtatgcattagctattagcagctccgcagtcagcagtaggtcgtatcaggggactacggcattacacctggctagcagcatttgccaccgttttgtattgttgaggttgtttttaagttattttgtcttgtttcgtgttgttttagttttaagctgaagctgatgcagtcattagggatgaaaaaaaaaccaaaagcgatatgttagtcaataaatttagtgaaactgattctg

SEQ ID NO: 420 - DNA, 1007 bp, Aedes aegypti
atgtccactaagttggcgtcacgtttactggtgttatcgtccgttgggatcggcagttatttcgtgggatcgtttgtcgagcggaggaaaacaatcgactcaccggtttgccatcgggaaaccgagaaatttgattatgtaaacgagcaaggagctggaagtttcttgagggaaattgtgtccaagccggggctgcccatttttggtaccgtgtccgccgcttcgccaattccggccgaacagaaatcgtcggcagtgccggccaatgtgagtcgcgtcgggcagattatgaagtacggcttcccaggactggataatgtgcggtcatatgacgattatgtgctttcctatgatcggaggactcgagtggcccattgggtgtttgagcatttgacggcggaatcggtcaaggcgaacgacgctgtggatcgggccaagtgtgactttaaagcggacgaaagcatacacccgttcttccggtcgttgaattcggattacaaaggttccgggtttgaccggggacatttggcagcggctgggaatcataggcttcatcagcaacattgtgaccagacgttcttcctgactaatatggcaccgcaggtcggtgtcggtttcaacagggacaaatggaaccatctggagcgatatgtgcgaaagcttaccaagcaataccagaacgtgtactgttgcactggtccactctacctgccccgaaaggaagccgatggtaaactgtacgtcaagtaccaagttattggcgccagtaacgtggcagttccgacacatttctacaaagtggtggtcatggagtccgccgaccacaaactggaaatggaagcctacgtgctgccgaatcagaaaattgacgacgatacaccgttgactatgtttcaggtgccaccggagacgatcgaaagggcagccggtctgctattcttcgataagatcgcccggaatcaactgtctcgaataaatggtaagaaaatttaattcatccgtcactc

SEQ ID NO: 421 - DNA, 993 bp, Aedes aegypti
atgtccactaagttggcgtcacgttttctggtgttatcgtccgttgggataggcagttatttcgtgggatcgtttgtcgagcggaggaaaacaatcgacttaccggtttgccatcgggaaaccgagacatttgattatgtaaacgagcaaggagctggaagtttcttgagggaaattgtgtccaagccggggctgcccatttttggtaccgtgtccgccgcttcgccaattccggccgaacagaaatcgtcggcagtgccggccaatgtgagtcgcgtcgggcagattatgaagtacggcttcccaggactggataatgtgcggtcatatgacgattatgtgctttcctatgatcggaggactcgagtggcccattgggtgtttgagcatttgacggcggaatcggtcaaggcgaacgacgctgtggatcgggccaagtgtgactttaaagcggacgaaagcatacacccgttcttccggtcgttgaattcggattacaaaggttcagggtttgaccggggacatttggcagcggctgggaatcataggcttcatcagcaacattgtgaccagacgttcttcctgactaatatggcaccgcaggtcggtgtcggtttcaacagggacaaatggaaccacctggagcgatatgtgcgaaagcttaccaagcaataccaaaacgtgtactgttgcactggtccactctacctgccccgaaaggaagccgatggtaaactgtacgtcaagtaccaagttattggcgccagtaacgtggcagttccaacacatttctacaaagtggtggtcatggagtccgccgaccacaaactggaaatggaagcttacgtgctgccgaatcagaaaattgacgacgaaacaccgttgactatgtttcaggtgccaccggagacgatcgaaagggcagccggtctgctattcttcgataagatcgcccggaatcaactgtctcgaataaatggtaagaaaatttaa

SEQ ID NO: 422 - DNA, 492 bp, Aedes aegypti
gaaaataaccgcacgtgcgacatgcgtaagcttaacttccgcttacggaagctataaaaaacgtgacacctgtccggtgcacgttccaacatgagatcgacattggttgtgctattactcctaattgtgcaagcattcgaagcgagggtgtgtcctactttatgttgtgaagatccaaacgaagtgtacctaatatgtggatcgttgtgtgagagaacctgtaccaatctgtacgattgcgacctgtgtccggcggtttgtgtatcagggtgcttctgcaaagatggatatgtacgggattcacttgggacgtgtatcccggcttgtgattgccccattttaaccacgacgttggccccaactactaccaagaagaaaccactcaagtgcaagccacctacaactactacaacggaagctccttgctcatgtacaacgaccactgaagcaccatgcctatgttcaaccactactgttgctccttgtgcctaa

SEQ ID NO: 423 - DNA, 330 bp, Aedes aegypti
atgattccgaaatcgttgccatttcgtcgtccctcaggaggacgtcccgccgcctggacgccatcatcgtcgtctccattgacatttactatcgataagttcgtttctccccgcgtcattgatgtacccgccgaaagtcgcctgccggcatccgttggcgcaacctcatcaaccttttacaacaacaccaaactattcgcttccactagtccgattgaacggaagcttcaaagacggcgccggccacaggatcaacggggacggctattcaaactcaccaagcaacagattacaatgcaaacgctgcgtgatagccccgcccccccatag

SEQ ID NO: 424 - DNA, 1251 bp, Aedes aegypti
atggatgataatctaacgtattttctgactacgggtggtttgttcggggaaaatgcttcgataggagagaatgcattgaacgacacaggagggatgcctcgtggcaacttcacctgcccatcgacggatatgccaaccacgtacactgtgttcatgatactatatgccgtcgtgtgtctggttggtgtcatgggcaatacgttggtaatctatgtggtgctacgattttccaacatgcagacggtgaccaacatgtacattctgaatctggcgattgcggacgagtgcttcctgatcggtattccgttcctgatagcaacgatgcacatgaagcgttgggtcttcggtggagccatgtgcaaagcctatatggtcagcacgtcgattacgcaattcacctcttcaatatttctgttcatcatgtctgccgaccgctatatagctatttgtcaccatatctcatcgcccaagtacaggacgcctctggtgtctcgagtggtctctgctcttgcttggctagcttccgctctaatcatgctgccaatcatgatttacggtgacatcatccagctgcaacccaacagctactcgtgtcaaatcgtgtggccagaatcacacgaacatatgcccggatacacgttcacgctctactcgctgatcttgggatttgtagtgccactctgctttataatgacattttactgtctcgtgattcgcaaacttcgtaacgtagggccaaaaacgaccaacaaatcacgcggaaaacgacgttcccaccggaaggtaacgaaactagtgctaaccgtaatcaccgtctacatcctttgttggctaccgtactggatttcgcaggtagcgttaattacttccccggatgggtcctgcagcactcggctcgatatcatacttttcctcctggtcggttgtttaggttacattaactcagccataaaccccatcctctacgcgtaccttagcgaaaactttaagaaaagttttcttaaagcctgcacctgtgccgcccgggcagaggtaaatgcccagttaaaattagaaaacagcgtaatgccgaagcggtcccgcactcgaacgaactccgacacgacccaactgaccacatcgaaagtgcaacatcggctgttgatcgatccgaccacgacggccaccacgacaacgaccgcggcatcaaccgtgtcctcgcggaatcccagcccacctgtcgtacaaaggagcttaatgaacaataaccat

SEQ ID NO: 425 - DNA, 2785 bp, Aedes aegypti
atgacgcaaaccgtagtcgaagtgcactggttccccaagtatccggatcgtttcctcacggcggccggatcggagattaacctttaccaggtcaaacaccgcgatctgatcgaccatagcatccaaaccaatatcaatttagacatttccaaaagcaccactgccacattgattgccttcgagacacgataccagtttatccggtcggttgctccgtccttccattcaacgggggagattctgtttgcggctgggttgcccaatgggaaggtagcactgtgcaattttgcaaccgagaacaatgtggaattcacaccgagattatcacgtccatgtacgtgccttgcttggagtgagctggagccaagcctactggcgatgggacacgatagaaatcgttccgatcattgcattacaatatgggatacggaacgaggcgttcccaatcaatcctctatcctccagttgatcgggttgtcggagacggcacattccatctgctgggataagacgtttccgcaggttttgatagccggaatgagccataagcacatcaagatgatggatttcagacaaaatccagccatcgtaacgttggccaacgcccgaaccgtcaacggactctgcatcgctcccaacggtcgctatctgtccagttacgtggataacgtaatcaacctgtgggacctgcgatcgctcgagaaaccaatcagccagatccaaatgcagaagaacatcacccacttatcgtggtgtccaacgcgttcctcggtccttaccacgctccagcgagactcgccgttgatcaacctgatcgatctgcactggcccggttcggaatccgacggaggggacccccattccataaaacggttcgttactccgttccaagcgagggccaccaatcgcatgccgaccatgggatatctttcgtggcatccgtacgatctggagcggatgttggccctgtccggaacagggacgatttgcgattatcgtattccgcagcgagtggccatcgcctgggataacaacaacaatttgtatgggaacgatggatgtgaattgcagcagcttacatcgccttcgccgtcatcgtcgccaacggattccctgaaccagtgggattgcgggatcgacagctacgaggaagacattgccgaaacgattcagaagagagcgctcaacaattatggtctgacagcggaaatgcaacgaaatggggatcttgctggtaattccaatcttaaaggcgtctggcggctgctcggccacatgatcaaggaggactgcaagctgggcttgaacacgatcctcggagtctgcagtgctccggatgggccggctatgtcccgttccgacccggtcatgatgaagtggctggatttcagcatcggaagtggcttggtcgtttatcgaagcgaacaaagagatacggctcaactgctctgcggatggacattcgatcggagcaaggaatcttcgttcctgtccttcatagaggaactctgctcaaacaaagaatacactcgggctgccctgattgcttgctttcactttcggatcaagcaagccatcgaaatcctcagctgtggagctgaacaaccttccgacccgacttccctgctccgtgtagctgccatagccctgtccgggttcagtgccgagcgttccggcctgtggcgaaagcagtgtggcgctgctcgaacccaaatcgatgatccctatctgcggtgcatgttctccttcctggcgcacgaaaaggacggcttcgaaaccgtgaccaacgaaacggaaatttcccttagtgatcggatggccttcgcttgtaattttctctcagaccttaaactcgcagagtacatcaagggaatggtcgccaactgcatcgagtccggagatttgaatggccttcttctaacaggagccaccaacgacggtatcaaactgctccaaagccacctggatagaaccgaggatgttcaaaccgtcgccctgatagcagcgcgtttcctcacctccgatttgctaaccgactatcgcgttcaatactggatttcaacctatcgggaccttctggacatctggggcttgtgggagcaacgtgcccagctggacatcaccctgggaagaattcgttccccgccgcaaaactctcgatcagttttcctcctgtgcaacttttgcggcaagaacgtctcgatggccctgcaggaggatgcccgggtccggagcaatgcggccgtcatgcataagctttcgtcttgcccgaactgccggaaaccgttgccgcgttgtgcgctctgtctgctgcacatgggaaccacgatgggtgccatctcgcagggtcacgccgcccaagggcagatcgggtggcaatcgaagccgttctcgaagtggttctcatggtgtcagacctgtcggcatgggggtcacacggagcatctggcagagtggttcaacgaaaatactgaatgtccggtgacgtcctgcaactgtaagtgtttcgccaaagatctcccgatgccgcagtatccgcgggagaaggacatcctgtcctgataccaactcgccacgatgttctaatctaaacgtttcataatctaatgctattaggcagcattttttttttcaagttcgctcactttctattgctttgatatcgtgtacaaagtgttgttaggttacgtaagaagatttttattagaataaactttttttttctctttcgaaaggcattaactactacctttatccaaatgctcttgttcacaaagatttcaaa

SEQ ID NO: 426 - DNA, 3792 bp, Aedes aegypti
atgacactgagccgtggaccttacagcgagctcgataaaatgagccttttccaagatttgaagctgaaacgaagaaaagttgactcaagatgtagcagcgatggagagtctatagcggataccagcacttcatcacctgaccttttgcagcctttgtcacccaagatgtgcgatcagcagcagtcggcaggccaattggagctggacgatcccaccgagctcgaggatggctctccagctccaacggctgctgcaaatcaccaccaccaccttcaacaccacccaactcaccaccaccctcatcatcaccatcatcacccccatagcaataatatggataataacaacacgttaacaagcaacaataacaacaacgactgtataacgtcaccaaagttagaacatgatggcagcatgatgaaggacgatgatggcgacagtgaaagggcgtcaccagattcgcctggtttgctaatcgacgaacgtccaccttcgagactgaaacctgcggatcctggtggttgtacgccgggtgcacttcctaattcctccaattgcggtgggggcgctagtgtgatacgttcggtggcggatgagcgtccccggtcttcaagtccgccaaacagccataatttagcgctaatgaattccattcaactcctgcaacaacactacagtgcaagcggtaacgctggtagcagtagtagtagcagctctattggtgctgcccagagtgtgccaggtcatcagcaacaacagcacgtgaccgtacttgtcaccccatctcgaatgaaaccagatcatccgacgacgttggttacgctagggatgcgaaaacaggcgccaccgtcaattaatctagcaaataccagcaacaacaccaacagcagtagcactaatagtagtaataattgtaacggtagtaatagcaacgttggtagtaataagaacgaagagcctaatagacttacatcgacaccgcagagttcaacgtcgtcatcaccttcatcttcgtcgtcatcttcgaactcatcatcgaattcgtcatcaacatgtggtgtatcgccaaatcaagcaaaccaacaaccagtccatcttcagatgtttcaacagcctcctatcggtggcatgtctaagttctcatctagtcaatctttgtcaaacaattcaaatatccaacagcagcaacagcatctcgcccaacaacaaatgctgcaagcaatgcaacagcaaattcggataaaaaaggaacgcatgccccaatacacgatagttaaccaaaataccaacatgtcattaatgcatggcaaccaacatcgccagcagaacattcacatgattcctaacccacaacagcagctgtatgtgaaacgtgaacgaccattacctggtcagagtcacacagttgtgaacatgccgcctgtttcgatggctggtccggctaatcaccaaaggcaacctccgagtagtcctgtccaagtctgcaacagcacatcgccaatgcagccacctatgtcaccaagtcaacagcatcaaaaccgacagcaaagccccgttcatatggggtccaacaatatgggccaatcaccacatattatcatcaaacgagaacggcaagcagctagtcaaagtatgactaatgctatgcaactatcaccaaacaaccagcggttaccaagtcctattcaagtcagtcctaccacgtctccactaaatcccgccatgcagatacgacaccccatgcgggatgctgccatattatttcgcgtaaaaaatgaagcacaagtaccaaatctcatgcaacagcaaccacctggaatggctcaccggataaccgtttggcccggtggacagcagcgtatcaatggcgtcaaaccggaagtgatcggtggcccgttaccgccgttgcgaaaccaaatgtccccccaacagtcgccgcagcaccatcaaagtcctagccctatcgcctcgcaaacgccaccacggaacaccccgacagtcatcatgggcgagtcgtgcggtgtacggactatggtctggagctacgactctccaccgcaagtacaaaccactacgccaccaattgcgccatcttcggcgacaaacgtgacagcatcgcagggtccgctaggtcctggatcttcgctcgggatgggcaccattcctccctcgccgggtaaccaccatcaccaaaacagcaacagcagcagtagcagcagtagtaccaacaacaacgaggaggcggcgcatctacttctaagcttaggacaaaccgtaaggcaaaacgaggctcaaccatggactcccaatcgatccggactgcccctgaatatggaacggttgtgggcgggagattatacccagttccccacgggacaccaaatgcatgctctcaatctcacctcgcagcaaccgtggaatatgccaccgggtccaaaaaaggaattgcttgaggacatgcctcctgacgaggatgaacaaccgttggtgtgcatgatctgcgaagacaaagccaccggattgcactacggcatcatcacctgcgaaggctgcaaaggattcttcaagcgaaccgtgcaaaaccgaagggtttacacgtgcgtcgcggatggtacctgtgaaataactaaggcccagcgcaaccgctgccagtattgtagatttaagaagtgtatcgagcaaggaatggtgcttcaagctgttcgagaagatcgtatgccaggaggacgaaacagtggcgcggtttacaacctgtacaaagtaaaatataagaaacacaagaaaaacaaccagaaaggtaacaaccaccaaaaactcggcatgcccggtgacaatccaaagtcgatgttcttgacgtcatcgacgacgccgccgatcaagtcggaaagtattagtctgccatcgcacctggtcaatggaacgatactgaaaactgccctgaccaatccaagcgaaatcgtgcatttacgccatagactggacaacgccgtcagctcgtccaaggatcggtcgatctcgtacgagcaagccttgaacatgatacatacccttatagactgtgatgctatggaggacatagcgaccctaccgcattttagtgaattcctcgccgacaagtcggaaattggcgataagctctgtaatataggtgattcgattgtacataagctcgtctcgtggactcgcaagttgcccttctacatggacatcccggtagagatccacacaaagctactgacagacaaatggcacgagatactggtgctgacgaccgccgcctatcaggccttacacggcagcaaaagcataggtagccagctccaatcctcgaccggcgggaacggtccgggaggtggaaccgttctcgcacctgacaaacaagactccgagtttgtcgaagagatcacagcccacctgcatacgttacaatcctgcctaaccaccctaatgggtcatccgatttcgatcgaacaactgaaaattgacgtcggtcaaatggttgagaagatgacccaaattacgataatgttccgacggagtaaactcaagatggaagagtacgtctgtctcaaggtttacattctgttgaacaaagaagtcgaattggagagcatacaggaacggtacgttcaagtacttaggacttatctacagcacaccgtaccacacagtccaaatcgactggcggacctgttatcccatatacctgagatccaaaccgctgccagcttactactggagagtaaaatgttctacgtaccgttcgttctgaactctgccaatattaggtag

SEQ ID NO: 427 - DNA, 1219 bp, Aedes aegypti
tcgagagcttcgagtattcattcacgggtagaacgtacgcgatctgtgtgctattacgggtgcgacgaattataaatcagcgaaaacaatccgagtgataagctgcagttgaggacaattcgaagttcaagttcagttgataataattggcgagaggaacaacagtgtgacagtctgtgataacgtttggacagctagctctggaaacgacgaaacaccatgaggaatcaattgatcagtcagatattggaggacggttataccgtaattgacgacttcctgactccagaagaggtcacagagctgctggaggctggaaagaatcttcacaaagatgcacccaaagaggaacggaaagttttcagcaccatcaattccagcgccacccaaagccgagaccgatacttcatcgaaagtggtgacaaagttcggtacttcttcgaggaaggtgctgttgcagagaacggagaactactggtagatccatcggtggcgctcaataaagtcggccacgctctacacactgatcatgccgttttcaacaaggtcacattctccaaccgcgtgaaagaagtctgttggcagctcggtttccagaagcccgccgttgctcaaagtatgtacattttcaaaaaccccggaattggaggagaagtcaaaccacatcaggacgccacctatttgtacacggaacccagttcaacgattggtttctggattcctctggaagacgccactctacaaaatggttgcctgcacttcatcaaaggatcacataaaagcggagtccatcgaagatacattcgcaatccagataaatcctcccccgaattgttgatctacgaccggccagcccctctctaccctcagtccaatttctgtgccgccccggtgaaagcaggctcgctggtcctcatccacagtcaggtggtgcatcggagcgacgcgaaccgatcggaccgtagccggcatgcgtacaccttccacgtgatcgaaacggaaaactcggcatactcctgcgaaaactggctgcaaccggcaaccgatcagcccttcccagtgctttacgagagggattgagcgcgcagtttgtacccgtagaaggaaagaacgcagatgcatgtgccatagtcgatgatgattatattttattgttctttttctttatttctatggacaaatatacctttttactatgagtaaactcaaacaaaagggg

SEQ ID NO: 428 - DNA, 852 bp, Aedes aegypti
atgtatcattccggccttccctacaaagtgtactccggtcacgattcggtgctggcggagaagcggaaacagcgccggatacgaaccaccttcacgtcggcccagcttaaggaactggaacgtgccttccaggagacgcactatccggacatctacacccgcgaggaaattgccatgaagattgacctcaccgaggcgagggtgcaggtttggttccagaaccggcgggccaagttccggaagcaggagcggatcgcccagcagaaggtctcgagcaataacaacaacaacaacaacaacagcaacacgagcaacaacaataacaacaacagcagcgcggattcgtcgtcggtcaagagcgagcagaaatcgtccagcgccgccggaagtacgaccccgaaggacatcaaaccgggctcgccgctgtccaacgtgtccaccactccgaactcgagcgcttcctcccaccagtccaatggcgatatcaaaccgatcaatggaaaactctccgattcggatctgaacgggctgtcggtgccccaccacggagggcccggtggaggagcagggctcggatcactccaccaccaccaccacaacaataacaacagcagcagcagtgccagcaaatggagctcctcgtgcaatccgctgctgcaaagtcagaaagcatcgtcggcggtgaaccacttgggcatgaatcacaatctgcagaatcatcaccaccatgcggtggcggcgctgtcgtctccattttcctcgctactgggagctggcggtggagccgccgggtacttgttggatccgctagggggactgaacaaaactaccgcggccaatcatttgttctaa

SEQ ID NO: 429 - DNA, 2330 bp, Aedes aegypti
ggtgacagattactcgacatcccatgcaaggtgtgtggggatcgtagctcaggaaaacactatggcatctacagttgtgacggctgttctggatttttcaaacgcagtatacatcggaatcgagtttacacctgcaaggcggctggtgaactgaagggtcggtgcccagtggacaaaacccatcggaaccagtgtcgagcctgtcgattatccaagtgcttccaatccgcgatgaacaaagacgatgtgcaaacgaaatcacattacaggaggcaaacacagctgacgaagcttccacaccttattcgcccagccgggaaatccttcagcgatttcacagctcattttcactttggagattacatgcacaaacataattcgcaactaagccatcggcagctgctcctggcgaagcgaaacgtcttccactcactccaccataaattgaaggctttcgccacaaaccaaaattttgagttcaataatccccttttaacgccattttcactccagttgtactttttcgcttttccgcttctaagacggttgatgtctcgctcgcaggagataaagttttatccttttggccaacgaaagttgattgctgtcgggaattttgataaaacagctcaccatgagcgcttcaattttaatttgccattcaccaatcgattggggtatagttgcggatctatcgaacgatggcttctgggtagactcttgcttccactaatgcttccattccgtgacgcgagtgtaattaatttttcattgctttgctgttcaacacgaacgcggtccgcggaaacccaagctgcaacaccttcagccaaatggacatcatccacatcatctgggaggaccattcgtgaacacatcgtcctacggccacgttcctcattttgccaacctgcaccattcagcaatgcaacagagctcgatccttcatcatccacagcctttgtcctttgccccattgggacaccacatgcctccaacgctcctgcctccgtaaaattagaacaacctaaatttgaatttcctcccaccagcaatggacagttacctccctcattgttaccctctgtcaaactagaacagaacaaaatgtcttcgttcgacttcccgccatcgagtcatcgattctacaaacccttagagcaactccctccttcacctacaaattccaaaagttcaataagtgtagactctccatcagaaggcttaaccagtccacaaccttcgacgatagactgtggatccagtgtccttagccctaccccaatcaatgctagtaatctcagtcttccttcaccattgtcccaaactggggtgttagatatcataatgagttccgataaatgccaggaattcatccagtatcaaatgcacaataacaatctgatgttcccaggatacaattcaccggaaacaggtgaaacagttccccaaccacctcctccgcctccaccactgattccacatcccacacctttgactgctgacagccccggaatacgattacccacttgggaaattctacaggaaaccaccgcccgacttttattcatgtcagtgcgatgggtacgctgtttgatccccttccaaacgctgtccaagaatgatcagcatcttttgctacaggaatcgtggaaggagctgtttctgctaaatttcgcccaatggagtgttccctgggatctgagtgcattgctcgagagtccacaggtgcgtgatcgaataccgcatgatcctgccacccagatggaaatgaaaacgatgcaagagatactgtgtcgcttccggcagatttccccggatctcagcgaactaggctgcatgaaggcagtgatactattttctccagaaacttccgagctatgcgacgtccaaccggtggaaatgctgcaagaccaggcccagtgtgtcctgtcagatcacgtacgggtgcgctatccccgtcagccgacccgatttgggcgcctgttgcttctgctcccactgctgcggacaatccgctccgtaaccatcgaaacgcttttcttcaaagaaaccataggtaccgtgcccatctcccggctcctaatcgatatgtatcagatggaaaagtacaccgatctcgaaaccggcacaccaggagtcagcatcggtacaccgtcagtgaagcattaatcgtttggccaggtgcgaacgaaatcatcatttcccatcagcgtgagaggggtatgtagttcatagggaggacaaatgaaaaacaaaatttgaagaaacatccaggatagaaataaccactgtcatgaatttccgcgaatatactttaagttaaacat

SEQ ID NO: 430 - DNA, 3303 bp, Aedes aegypti
ttttccgattcaaaaccaaaatcaatccaacaacgctttctgtttatcaataaaaatcgcttcactccagaaattcagtccgcttgcggggcagtgttttaatgtaaaaacaaagtgtaatatcagtgaagtttgacgaaaggaatgcagcaatgctgctttattgaattacagtggattattggaagtaaccgcactagaaaatcgagttaacccagtaagatgagcttcggcgatcggattgaggactacgaagtgtacgaaattcttggcaaaggtggatttgcaagtgtttaccgtgcaagatgcctgggaagtggaaccttcgtggcgatcaagatgatcgacaaaaagttgatgcaatcctcggggatggccaatcgagtccggcaggaggtcagtatccattcccagctgaagcacccgtcaatcttggaactgtacacgttcttcgaggatgccagccatgtctatctggttctggagctggccgaaaacggtgaactgcaacggtatctccgtgagacgaagaagactttcaatgaatatgaagctgcgtcggtcctgaaacaggtggtggatggccttctgtatctccattcgcaccacattctgcaccgggacatgtcccttgccaatctgcttctgacgaaacagatgaccgtcaagatatcggactttggactggccacgcagttgacacgaccggatgaaaagcatatgaccctatgcgggactccgaattatatttcgccggaggtggcgtcccgggcatcacatggtctaccggccgatgtctggggtcttggttgtatgctatacactttcctggtggggaaacctcctttcgacacggaaggagtcaagtccaccctgacgaaggtcgtgatgtccaactacaccattccgccgtacatttcttcggaggcacgggatctgatagatcaactattgaagaagaaccctgcggagcggatcaagctggatcaggtattgcagcatccgtttatgagaaaggccaccagctacgatagctatcgtggcggaggaactctagcttccagcgatagcggactcgtaacgatgtccagcaacggaggatccaaccgatccaacatcccttcgagctacggccaggatcaacggctacaagccccaatcatccatcaaatgcctcttcggtaccaaccgatcagcgaacacgagtacgacttccaggagagcatcttgccacagcagcgacctcaatctgcatcgcacaacaaaccaacgtcggattttttctccggcattagcaacgatcctcgaacgatggccccatcgtcccgccccatgcaacaccatctgaatcagatatccctgctgcagcagttcaacagtttggagctgatggaaaagtacaacattaacaaagcggacattgccagcgtgggacgatcggcatccgagggcagctcgggagtgcttctgcaggagcatcaacagcaaatgatacagcaacatgctatttcgttgctgaattccaaacccaaatcggcttccatatcgatgctataccagagagcagatagtgctgctggtccttcgtcgtttggtgaaaaggagaactatgctcttcacaggaggggtgaccgggaaacgccattgaatccgggaaattatgatttcatcgaacactttcaacctaaagacaacaactacccaccgcgcagtgccactccgaagcgcagaagtccaaccaaatcgccgaaaaagcgtctggacataccacctctgaacactgcccgtttgctccccaatcggcacaagacgaaaaatgccatcctcagcatccgatccagcggtgaggtcgtcctggagttcatcaagttcaaaacccgctacaaagagaaccgggtggtggacgtttgtcgcatctcgtcggatgggcttcgctttgtgctgtaccatccggatggggggaaaggcgttccgatagaggaagaaccacccgatttgccgccgggaggtgccgacagtattttcagctatgagaaccttccggagaagcactggaagaagtaccaatacgcggcccggttcgtgcagatggtgaaggccaaaacgcccaagatcacgtactacagcgagaaggccaagtgccaactgatggaaacgttggaggattatgaagcgagtttctatagtggaaccaaaatcatcaaatcgcctcaggatggcgtcaaatttgtggattccagcggcatcgcgataaagaccattgctagtctgagttcatcgcagaacgcagaatatcagcactttcagcagaccctggaacactgcctcaacatcgagcgggccctttccgccatccaaaccgggaagaccttcccgctcatcatcggtcgacgacccgcaaatgctcctcttacatcctcctcctcctcatcctcttcctcaaccaaagaaaaccaactctattccaacatctcctctcccaacactccgcaaacgcctcaccagatgccttcttttgccatgtccacggcgtcccacacttcggcagggaacccgctcactcaacggccagtcctctcgtccaaacccgtgccggccaacttcagcaacgtggccatgaagaagtgcaccatcgcaggcgtaggaacggccgtccagctatcgcaaggcgtcgtccaggtccagtttctcgacggggccaccctttcgttgatcccgatcgagcaaggaggcggagtcacgttttccccggccgtgggaagcccactgcagcactattccacccaggacaatgatgcgctgcttccggcgagtctgcgcgagaaaatcggccaaatgccggcgatcttacgcgaactgaatgcggccccggtgccgtcgattccgttcaactttctagagggatcgccgcggacaccgttgacgcggtttttgcgataagtttcgtgcgggggtggaaatagttgttaaagttccaatcaacaaaatcagtttttaaggccaaacactctctactaattgtatttgtaggtagtattacgatggttaagagattttatcgactgtgaaatcacgttctacggacagtaggaaatttgcattattttctagttgagaaactgtactgaagtaatttattacacatatattttttatcgaataaaattgaaaagacaagttttattcagctggtgtgttcattatgatcaatggattgaagaagaaccgtcaaattgagtgttttaggatgttttttacattttttatacaacttttcttttagggatcgtttaaatattacgt

SEQ ID NO: 431 - DNA, 1141 bp, Aedes aegypti
tgtcatgaattattttcgttcgacgatcggacgtggcgattgtttttcaataagcaatcgattttctctggataatttcgcattgatatagcgaataccgcgaattagaagttccgtaataacgtgatcaatcgataatgggtctttgcaagtgtcctaagcggcaagtgactacgcaattctgcttcgaacatcgggtgaacgtctgcgaaaattgcatggttgtaaatcacaccaagtgtacggttcaatcatacatccagtggctaaaggatagtgattttgattcgtcttgtccattgtgcggaagtccacttgacaacgaggattgtgtgcgacttatctgctatcatgtgtttcattggaaatgtttgaatgcgaaacaacaatccttgccggcaaatactgcacctgggggacatacatgcccaacctgtagcgatcctattttcccaccagtcaatctagtctcaccagtggccgacgttctccggacaagattgggacaggtgaactgggcgagaaacgttcttgagcttccgttgctatcggaagataaaccagattattacaccactgcgaccacttcggctggggttcacaatggaaatacctttgcgtccagtatgtcccaaaccagatcgaacgaacgacccgaaagtcctcactcaattgttaacatggaatcgtacgttagtaatgcatcacctgctctagattttcacgcgagcagtcgacgtccactgttggctcgggagtccccaataggggcatccgatagggacgataataagtataagagaaggacaccccaggaaatattctcccgctggtctagaagactgtacgcgccatcctcaaagccaccatggagacgaacgtggttccttgtgcttggaggttgcattggttttgtttgcatcatttacgttctagccactttgggacgccgcggcggagatggagaagtgggcctgatttacaaccgtaatctgccgcacgaagaatgaaggaatgctaaaatggtaaagcaccaccattccaacacgaaaacaacacagatcagtcttttactattcaaattatttctatatttgttattttgtattatctaatatatttctagggtcacatctaccaa

SEQ ID NO: 432 - DNA, 876 bp, Aedes aegypti
ggcagttccagtactcttgtgttttgttgtgtgaatttacagaaaagtttttacaaaagtaaaatgccgaaaaagggccatcggaaaaactccaagaagatgaagcaccagaaccaggagaacgaagcgcgctctgccgaaaaaaagcaactcaaagagatgctaatagaacgtgatctgttccgtcccggcatgaagatccgggaaatgcgagagctctgcaccgccatcgaggagtcaatgctggaccatgaattgctccaaagaagcaatcagttcaacggaagcttcagggatgaggacttgaaccagcgcattctgcgggacttcgcccttctggagaacccggcgtcctcggaaaagctaaactttattagcgatccagccactccaccgacgaatgcgtcccctccgaagttcaccggccgtcgtccatcacctaacatgtccgaatttcctccactgacatcaccgattgcaggaaaagccccctcgggaccatgttccaaaccatccgactctgacagtgatggcgactattactcgcccgaatttccgtccgtgctgccgtatctcccatgtcgtccaagtcgaagtccacccggagccacgagcctatgattgcaacggtgacgacgataaacagctacgctggattgcttcgccggggattaaatcatcgccaaggctggtaaagccgtcagccaaagcgtgggacgccattgacgaagtgccctgaatcatacccgaaagctatcagttatcatttcaccgccacaggtaagttttttcgaacaatgaacgttgcgtagtcagagttgtgtgcttgcactgaagttcaatataatatattcagatttctatgttcgttcgttg

SEQ ID NO: 433 - DNA, 2484 bp, Aedes aegypti
ggtgaccttatcctgggtggcctgatgatggttcactccagagaggactcggtaacatgtggccctatcatgcctcagggaggcattcaagcgttggaaactatgttatacactttggacaaaatcaacatggacaatctcatacccaacgttaccattggagcccacatcctggatgactgtgacaaagatacgtacgggttagaaatggcggtagatttcatcaaagggtcaatcagcaatatagacgaagctaccgattacaacaactgcagcagcaaggggcacaagaagaaggtgatctccggagttgttggagctgcttcatcagtgacttccatccaagtggccaatcttttgcgactgttcaagattccgcaggtgtcatatttttccacaagccctgaattgagcaataaacaaagattcgaatatttctctcgaacaataccatctgaccattatcaagttaaggcaatagtcgacatcgtccggcagctcggttggagttatatatccataatctacgaggaaagtaactatggtataaaggcttttgaagaacttgatgatttactttccaaacatggcatttgcatagcgatcaaggaaaagttggtaaaagattctggagtagcggaaaaaatcgcatatgataacatagttattaaattactgacgaaaccaagagctaagggcgtgataatattcggctctgatcaagaagtggcagaagtcatgcgagcagttcgccgacagaatgttacgggcgtattctcctggataggctcggacggctggagtgcccgaaatctggtatccgatggcaacgaagccgaagttgaaggcactctgtccgtgcaacctcaagcaaattccgtgatagggttcgaggaatattttttgaatttgacagtcgataacaattctcgaaacccgtggtttatcgaattctgggaggatcatttccaatgcaagtatcctaactctcccccgacgccgtacaacaagcagtatacgaaattttgttctgcgacagaaaaattaacgaaacatacgctcgacttcgaagatcaactgcagtttgtaagcgacgcagttatggcgttcggttacgcattcaagaatatgcaccaggagctgtgtggaagtaagccaggattgtgcgatgagatgaaccccacaaaaggagcagatttgctaaagtacctaaggaaagccgactttataggcctaagtggcgatagatttaatttcgatattaacggtgacggaccggcccgatataatatcattcattttaaacaatacgaacccgataagtacaaatggatcaaggtgggcgagtactaccagggagagctgcgcttgaatatggaagatatccaattcggcataaagaatcccaacccaccagagtcagtctgcagccggccttgtgaacgaggccaagcgaaaaaatatgttgaaggtgaaggctgctgttggcactgtttcaactgctctcagtatcagatacgaaatcccgctgatgaaacacactgtataaactgccccagaggaaccataccggatatttaccatgaaaactgtcagcacattccagaggactatctgaaaccggagtcaccctacgccataggggcaatgtcgttcagcagcctcggaatcgtgatgacacttttcgtagttggagttttcctgaaaaacaacgatacccctattgttagagcgtcaggtagggagttaagttatgtattgttgagcggaatactcttatgctacggtgtcacgtacgccctggttttcaaaccgaacgatattgtctgtggtgtgcaaagattttggtccggcttttcgttcactgtagtttacgcagcgcttttgaccaaaactaaccggattgcacgaatattcaatgcaagcaccaaatccgcaaagcgaccttccttcattagtccccactcacaattagttatatgtggcatactcatatcgtttcagatattgatcaatgccgtttggatggttgtttcgccggcccacgccatgcatcactatcctacgagggaagataacctactggtttgcaattcgtataccgatgcatcgtatatggttgcgtttttttatcccatattcctgatcatagtttgcaccgtgtatgccgtgctcactagaaaaacaccagaggctttcaacgagtcgaaatacataggtaagtatgatagcttcacaatgtacaccacctgtgttatctggttggccttcattccgttgtacttcggaacgggaaacaatgtacaacttcgtatagcatccatgtccgtaacgataagcctctctgcaacagttacccttgtttgcttgttctcccctaaggtaaatgaaattgttataagatcagtaggaacccattctgacggagccccctatattttccctgtaacagttgtacattatcctgattcgacccgagcgtaa

SEQ ID NO: 434 - DNA, 3398 bp, Aedes aegypti
atggcaaacgtgtttgaaatcgaatttggtgggcgaaaaagctgccaagaaggcaaaaataccacaaagatacgttatttgaccaaacgtacatatgccgaacgagcagacattcctccggcaatcgaaccacgcaaggaacatctattcaaagcacctccagtaccacccccaagaccgaagaagaccctcgaatcaagcaacataaacctcgtcccagaaaaaccacctccaccatcgccagcgctgttggcagctgctttatccgctccatccactccagcagatttgggattcatcagtcctcaacaagctgccacctccagtactgatcacggcgaagacaacaacaaatccaaactggccaacttggtggatcttaaaaaccgagacacgaactcgcacgtagacaaccctcccagtccattcatcctggcaccgccaccaaaaccagcggaacggatcgttgcccctcccagaaaagtgccagtggcgaagcacttcttagaagggccactcgaaactccatcggaattgttcacgcctaacaaaacgaaaagtttgacgctgaagaagaaaaactccatcctatcgaagagacggaatgtttctctgaaaacactttgcgttagtgacatacagggccacttgtatcgacggacaaaggatcggagtggactggcgtattgggccaagtactactttgtgcttattgaaactacactctacggtttcaaatccaaggactcgcacaaagccaatagtatgatattcctctctggctttacgatttcattggcgaaggaagttcattcgaagccgtacgcattcaaggtatatcacccgaacaagacgttctacttcgcggctgaaactcaggaagctcttggtcaatggatggaatatatcaagcaggctacactgaagggtaataatgctgctccgggcagcgggtcggcagaccacagtgtgaaggaactgttttcggaaaccgacagctcagaagacgaattcagtctaatggacagtcaaaccaagctcaatctcttgtgcactccgtcaccgcaattgtcgtcttccgttagaaacacggataatcattcaacgcatagcgatagcaatcacagtagcaccccaacatcctctaaacaggaaaagtaccatctgaatttcggatcgttgaaaaagtttaccaaaagctatcctttcaattctgacggaaatggctcgagcggtagcggcagcagtgaaagcagattttttgggttcttcacctccagcaagaatgtggaaaaatccaattccagtgaaatgccagttcccacatctcagtttcggagctatcgaaaggtaccggctaacagtgctgtacataatagcaccattcacccaatttctgctgaaattatgccatctgtagcacatgaccaaatcaaaacggcaagcaatttgtccctggcatcgatcagcaccacccaattcaatgttcctccggtcgttcatgctcaccgagcacccacccctcctccggtagaagaaaaaccccaacctgtgatagtggaaccgccgccgtcggaaccatcaaccccgattccttgcgaaaccgacgagttgctgaatcgcgcaaagaaaaccaagcgaatctcgccacacaactttatccatgcttccaatcccaatctggtggaatttgatttccaaacgtccaagcacatcatgcaatcagttaccaactgggatcccaacccatcacatagtaatcatcatacaatgattaccttaaaagaattgatgctacaaaagcaagcagaagaagcacaagatatgtacaataagcgtgtttgcttaggcgtagagaaattggacgatcggagcttgaagaaaacgctttcgaaacaaaacgaaatcaaaccggaaaatactgctgctcacgttccggaagcggtcaacaaaattcaaaaacggcggcttccgattactcctgattatgctcaaagctttaaattagacgacgaagacatcctctataccagaagcaaagagggccaaaagctgcgcgattttggatatgaactcatttcaggcgatgacacgtttgacttgaaaaattcaatggcaacctctgtggctagcacaagcaatcatcacgacagcaaacgcaatgatagcagtggctcaatcaaaaagaaaacccgtaactggatcaactcggaacgacgtaacgaagagtcttcctcttcagatcgttctttgcgcgacagtttcaaaaaatccaaaaacaaggttgtaatgctggacaacatcaaggcaagcagcgagaaactgttccagttcaaacacagcagcaataacgataaggaatcgttgaaaaccaaacacatggacaaaacgactccatcgctcaatgtgaacctgaagcaatcgggaccttttggcagtcttggcaaaaaccatcctggaacacctcaactcgaacagtcgactatattcagctcaaccaccacatccggtggctacattacgtctagccatgttctccctggcggaggcccgagcagctcatctataacgagttacattcccggtggaatcaaaaagtccaacacgtgcaatagttcctcggactttaaggaaaattccaaggtgcaaaatctgaggaagaactccgctcccgagcgtacggcatcctactttacaaaactctcgttcagtagctcttccggcaagacgcccaaggaaaagaaactgctgggatcgccgggattgcacagggcgttcttcgggaagaatcaacaacagcccactgtcatagaccacgaaattttctcccccatcacatttaccaagcaaagcaatatcccatccgacagcagcatgcagtccagttccaccatgaccagcacgataacgatcgggaacgtccaatcgacggcaacgaccacctcggtgctgaccagtaacctgtccaatcgagcctccccagactaccccaacatggagtatccgccggtgtttgaaccggaaacttactcgctcagtgatccgaccacgaccctcttgaagcgccgtcaaaatcaccacccaaaatgacgaccgataaggttagctacggttcgggagcacgagtgcggatgaagaatgtaagcgaaaatgactctccgtgattcttagcgattagtctgaaatgatattatgtattcttatgggataaatactaatccgtgtagattaagaatgttatacaattccaattaatcggaaggtgctgtaaacgttgttttataatgatttttccagaaatgatttttaaagactagtagggtttgtaatcaaatcaattatttattattggaagtgatttattgtgcatggaaaaaatataactttatcaaacgcat

SEQ ID NO: 435 - DNA, 3801 bp, Aedes aegypti
atgggaaggaatgcggatagcggagtgatggggtcgggtaacggattgatgtgttcgcggtggatgagtgtgcggctgattgtggcggtgttggctttggcagcatgtcatcgagtagcggcgcaggatggagaacatcactgtgtgatgtacggggtctgcaattatattggaatgcacaagcagaattgtccaactacggagaaggcaaggccgctggacaatctgcaaggtgaggagatcctgaagcgacggtgcggttttgtgtttgaagatgagaaaatgcctttgtgttgtaactacgagcagctcatagagctggacaacaacttcaaaaatggagaaggtgtgttcggcagatgtgagacatgcacgaggaatatgctgtacagtatttgcaacatggcttgcaatccggagcagagtcggttcctgacggctcatacggccccggaaggatactacgtcgataaagtggactatcgaatcgaccgagaacacgtgcagaatgtctacgactcatgtaagggtgtaatcctgccctcaagtggaaaatatgcgatggacatggcctgtggaggttgggagtccacgaggtgcaccgcggagaggtggttcgaatacctcggcgatgccgtcaataatgactacgtgcctttcatgattgagtaccattatccggaagacccggacatcagatacaatcaggatgtactgcattgcaacgaagggtacaatggttcgaacagttgttcgtgcgtggattgtttcgacagttgcccagtgtcggatccacctgaagctgaggatcctggattccttgtaggcgatttgaatggagtgaccttcgtggtggccgtagtcatcggagggttcggtttgtctatggttttgttcagtggtttctacaagtccaacggatcatcgtttgagtttcctaagttctgcggaggcttcccggccgtcaatagaggattgacgaagttcttcactcattggggaactttttgcgccgctcatccggtgttgataatcgctatctgctcttggattgttggtggcctttgctacggaatcatccacctgcagataactaccgatccggtcgaactgtgggctgctcccgaaagccgatcacgcgtcgaaaaggactactttgactcgcggttctcccctttctatagaactgcgcaaatgttcatcaaacctaccacgcagaactacatcgttcacgaaacatcaacgggtaacatcaccttcggtccagcatacgataaggagttcctgctcgcagtcttcgagctgcaagaacaaattgaacaaatcggccaggaggagggtgctggtctggaaaagatttgctacgccccgatgacggcagctggccaagaaacggtcctcagcgaatgcaccattcagtcggtgtttggatacttccagaacgactacgacaacttccactccgtgcgtcccgacttggaaggatttgaagtcaactatttgaacaagatcaacgactgcacccggaatgcgtacattccggcttgcttcggtccctacggtggacctgttgagcctggtatagccgttggaggtttcccaaagcctgctctgggagaaagtccggattaccgcctggccacaggagtgatcatcacctttcttatcaagaacaaggctaacaaagacgaactgggtccgatgatggagtgggagaagaagtacatcgagtttatcgagaaataccagaacccgttgatggacatagcctacacagcggagcgatcgatcgaggacggaattgacgccatgtccgaagccgagatgtacaccgtcatcatcagctacgtggtcatgttcgtctacattacgatctcgctgggaaaggttagcggcctccggacgttcttcaacgagtcgaagatcatcctggcggttggtggaatcgtggtggttttggtgtcggtcgcttgcagtttgggattcttcggatatctacagctggctacgaccatgttgacgatcgaggtgattccgtttttggtgttggccgtcggcgttgataacatctttatgctggttcacgccttccaacggattgatagggtacagactccggaaacggataaggccatcggaaaggctttgggtcagattgggccatcgatcttgctgacgtcggctagcgaatgctgctgctttgcgattggcggtttgtcgccgatgcctgcggttaacacgttcgcctggtatgctacggtggcactgttcgtggattttgttctgcagataactgcgttcgtggctttgatggcattggacgagcggcgagttgctagcggaaggttagacctgttctgttgcgtgaagagcgagaaaaaaatggttggaaacgaacagataggaattttggaaagtttcttcggaaagtattacgccccgtttctgatgaagaagccggtgcggttgacggtgttggctatcttcatcgtgctgtcgtcactctcgttaatggttgttccgaatgtggaacccggattggatcaggagctatcgatgccgaaagactcgcacttggtcaagtacttccaattcatggcggagctgctgtggatgggtcctccggtgtacttcgtactaaagcctggattgaactacacctcggtaccggaccagaacctggtttgcggaggagtcatgtgcaatgcggactccgtccaaacacagctgtatttagcttcgcgatatccagagataacccgaatcgctcgaccttcttcgtcctggttagatgactatattgattggctagccatcgacggctgctgtcgatacaacagaaccgacgggtcgttctgtttgagctccaacaccttttgcgaatcctgccctcgggagtttgacgaaacgggtgttcgcccaacggtcgaacagttcgagcggtatatggagttcttcctgtcagacattccggacgaccggtgcgccaaggctggtcgggcagcgtacttgacggcactaaactacgttacagactcggccggtcatctgaacgtccatgactcgtactttatgagctaccacacgacggtagtggtgtctagggacttctacgaagcactggagtgggctcgcaaaattaccgacgacatccagcggatgttagacgagaaagggaccggagtggagattttcccgtacagtgtgttctacgtgttctacgaacagtatttgactatttggggggatgctctgctatcgcttggactgtcgttggctgcggtattcgtagtgactctcttggtaaccggactggacgttgtgttctctctgattgtactactgatggtgttcttgattctgctaaacatgggaggcttcatgtgggcttggagcatcaccttgaacgcagtatcgttggtaaaccttgtcatgagcgttggtatcggcgtggagttcatctcgcacactgtgcgctcgtacaagaacgaagccggcagcaaggttgagcgggcagccgaagcgctaaccaagaccggtagcagtgtcttctccggaatcacgctgaccaagttcgctggaatcgttgtgttggccttcgccaactcacagatattccagatcttctacttccggatgtatctgggaatcgtgctgataggagctttccatggactgatcctgttgcctgtgttcctcagctacattggacctagatctacaaagcaagtgattatccacgcgaccacggatcccctgagcgaagcaaagtattcagcttcagaaaatcataacttctag

SEQ ID NO: 436 - DNA, 603 bp, Aedes aegypti
gcccgggccaaaattatcggttcacaggaggtgcacgtgaagaaaggcagcaccatctcgctgtcctgtgtcgtcaacgttctggcgtcgtccatctcgtggtaccacggatcctccgttgtcgacttcgattcggcccgcggaggcatcagcctggagacggagaaaaccgaaaccggcaccagcagccgtctgatgctgacccgggccaccctacgggactcgggcaactacacctgcgttccttcgggagccatctcagccagtgtgcaggttcacgttctgaacggtgaacatccagctgcaatgcagacaagcaacggagtggtactctgttcgtcacgatacgtgctagtttttgtactacttgcagccctaaatagttgtaatttaagtaaattaatctcctccatatcaacaaccgtactcaaaacggaaaggcaactgcgtcggacggttttgctggcgtcaacggcatcagtcggactcagtccaggaaggactgttgatggaaattcgagcggtttgggggaacttttcggaacgcgtgccctaactgcacgtggaattgagagagagagaggaaaagcgttcaaacggtga

SEQ ID NO: 437 - DNA, 1285 bp, Aedes aegypti
actcgccatctgtcaaacttgacagccaacgatattagaccagtttttgacggttcaaacgtttccaaagggcgcgcagcacgtgcgcgcgttgtttatgtttactttcactgttcgcttttgcttcgcgtgaaaccacccccaaataacatgaacaagtcgcgtaatttcaaaaagaaaaaccaccggaatcaaaccaacaccgggcgcaatcggaagcttgctgaaaagctttccgacctagcagtcgagtccagttcttcatcggaaaattcagcggaggaaaacagcagcgatgaggatggaagcggttcggaaggcccctcccacaaggataagttcgatctggggaaaccgccccaatttccggtcagtatgtgggatttgaaccattgcgatccaaaaaagtgctccgggcggaagctggcccgccacgggttgatcgagaacttgagactcgggcagaagtttcctggtcttgtgctaactcccgttggggtcaactgcgttagtccacaggacaagagtatcatccagagctctggaatagccgtcgtcgactgttcgtgggcccgacttgacgaaactccattcaacaagatgaaatctccccatccgagattgctcccgttcctggtggccgcgaatccgatcaactacggcaaaccctgcaaactgtcgtgcgttgaagcgatagccgcctcgatgtacatcaccggtttcaaggacgaagccctgtggtatctgaacaagttttcctggggccattcgtttgtggagctgaatcaggaactgctggattcgtatgctgcgtgtggcagcagtaaggaaattctagaagttcaaaacaaatacctggaaaaggcggaagcggagcaaaacaatcgaacgtatgaactggatctgcccccaagtgagagcgaagaaagtgaagaggaagatgttaaggaaaatgagtgacattagcgctagatagtaaattcataaaaagatatataatttggaaactaatcaatggttcggcttgtaggattgatcacatcatattcatttccttgatttatgctaaacttggacagcatttctggataagccagacgttttttgattattctgcgacacagaccccacaatcatccctattcttgttatcgttcgaaaatctttttacatttaattttacagtcaccccatagttatgaatctactattaaaaacattcgaaaacaatataataaaaaaaaacctgaagcgcctagacacatgtcaatttggacaaattgag

SEQ ID NO: 438 - DNA, 4115 bp, Aedes aegypti
tgaaacaagagtcgctttgtgtcgatcaatgaagattgtttacaccagcagaagtagcagcgacgtgcctcagggcaggggaggaattcgtacacgatccggtgtgtttgtgtaaatgtatacaaaacatccgaccggggcgagatctagtagccaggaagttcgggccgttgtttgcgctgacgtcggttgatcggcttctcgcctacttctcggaaggttcctcgaatggagatttattttgtaacattcttctgcggagttagatcagacatggcgtcgtcacctcacacagcatcagcgtgggaacaggtagtcgacggatcgacacccggacacgtacatacgtgcaagattgagcggcttactgctgagttattgtgttaacacagacggggaggaagcgacacgaggaagatcggaatttaagaatgaactctgccagaccaatagccgccgcctgattcggtgctcaaaactagaaagagaactgaagtcgtcatctgcttcgtcctccggcccctattcccgtcagcccacacttaccttttgtatttacacgagacacttttatggctccgaaaaacgaggcactgtgtgaatgagaagtgccgaacacaactgccggagataatcggaaccgatcgatcccatgaaaagccgtaaaaatatggctgtgcttcggatcgcccaccctggtagccgaaagccgtgggttttagttcgatccctcgtcgacatcgtcgtctcgtaacgaatgaaaattaatcatatttcttaattttcccttctccctacgctgattagccggaacgtccctctccgtctcattggaccgagagcccgggggcattgattaattgcggccggtataaattgaatttacacctcttcgggacttcgggaaggggcgaagaattgggcgcttcgactcttctgatggatgacgctcttgttggacgatgacggatgggtgttccgtgaagagagtgtcccgtggtgcgccggcaattatggccgatttttatttccgaagagctacaacaatcactacgacactgggatgactcattccgtgcggagagaggaggctgtggcggagattgcggcctcctacgcttcaaatgattccgagagatatatttgagacagtgcagtagtaggcgggaagttggacggagcgtccaaaacgggttgctttgttttggacggatcggatgctgcctcgttggctttgttgcttggagcaatcaattttgaaacacccaaacgtctgccgcgagctttcagattgggattcgttgctttttggaacggaaggagaactggacccaggaaaatgtctattcggcaaaacgctacgtgaactcggatccacatggttcgccgacttgggtcccccattcggtgtcatgtactgcatcaaatgtgaatgtataccggtgcagaaaaagcgacgaatcgtggcacgcgttcagtgccggaacatcaagaacgagtgcccgaagccgacctgcgacgagccgatcctgctgcccggaagatgctgcaaaacctgtccgggggacgcacacagtcctgacatcgtccaagatcttccacaagcagtgatgcccgaagaagaggagcgcagcaaacatttcgccgccctcctaaccggtcgcacctcgtccatcctgaaacgggacgacatgaagtccgtgtactcgacgatcaacccgctgaacttcgtcgccaccgggagattcgcgttccacaagaagaatctctactacagtttctacatctcggagaaggccccacgcccgcgcacgatccaattcgtcgaccatcagggcaacatcctggaggaacacccgctggtcatcccggccgagggtcccttcagcgtctaccagaacgcaaccggtaagatctgtggcgtgtggcgtcgggtaccccgtgactacaggcgtctcctgcgtgacgacatgatgaacgtcgtactgctctggggcggcaaacatcaagctgaactggcgatcgctggtccgatcggcaagtatccagccctaccgcaggagctgttcagttccctgctagaaccagctcccggaaccaatccggagcagatgaacggcgcaggtggcacggcaatcgtatccaccaagagcggcgtcacctcgtccatctacttaaccatcgtactgaatggcgtattctctccggacgatattgccgacgttcccctaaacatccgcctggagatgcagaacaaagatcaaatcgtcctggaagatactcaacgcgtcaggaagccggcccacgacatcaacatcattgaagtgtcgtccccgctgtccgtaaacgacctccgcctgttaactcgcggtaagctcacggtagtcgtcgaatccaagcgcaaacccgaagccttacgtatccaaggagtcatccaaacgcgcgtagcctgcgaagtgttccaaaccttgctggcgtcccacaatccagactcgcgaaccgatacgagcggcctcgcttggatgtacctcaacaaggaaggctccttggtctacaacgttcaaactcacaatctccacatgaatcacaacccagtggtcacgttgatcgacgacagcgccaagcgcaaggccgacctcgagacgcttaacatcgactccagtcacatcaccaacatcgtcgaccgcatgggtccacgtgtgctggaaccgctgtactccggcgacctcgcgataaacgtcgccaatgaccagaaccccaacctgatccacggcaagttcgttacccgaccggtcgctgacgcacgcgactccagcgcaccagtccttctgaagcgcatgggcaactcggccgtaccgctgcactccgtcggtatggcttggatggccgtcgataacgaatgcaacctacactacgaagtgacactgaccggcgtccccagctcgtaccacccggttcagctctacctcgatgaactccccatcgaagccccgaacgctccgatcagccaaacctccctggaagaattcaccggcaactacctcgaagggttcatcctggcgctgccgtcggccgagctggccaagctggaaaccagtgtcatctatctggaaatcttctcgaaatcgaaaaacgaaaccatcctgaaggcgaaagtcaagtcgatcaaggtgccgaaccactgcaccggccaccagtaccacgacaacgacgtccagaacaactcgttcgccccgatggcccccaacgacaacaccgtcccgacggtggaaacgaaatgctaccactcgtcccgcttctacgacgaaggggacatgtggcacagcgccctcgagagctgcaccatgtgctcgtgcgtacagaagcgcgtcaagtgcgaaccgatccgctgtccgccgctcaagtgccgcaaggaggacattgtccagaagcgcggcgactgctgcccgacctgcgcaggatcgaagtactcggacgacacccgggtggcgatgccgcgcgggtgcaagctcggcgaccagttccacgatgccggttccacctggcatccgtacctgccgccgaacgggtacgacacctgcaccgtttgcacctgcgacctggccacgctggaaattacctgcccgcggacgcagtgcccgccgctgagctgcagcgagaaggtggcctaccgaccggacaagaaagcctgctgcaaggtgtgccctcagatcatcgaacgcaccaaaccggttcgctcgggcaacccggacgaaatgggcgaccagggcagcagcagcggaacgctccgatctccccaagcgattctggagaacggcggctgcaagtacaatgggaacgtgtacgagaacggacaggacttccatccgatcctggcgtcgcacggcgagcagaagtgcgtcaagtgcacgtgcaaggacagcaaaatcaactgcgaacggaagcgatgcgcgcgcgcgttatgcaaccgtccgaaaaaggagaaaaacgccgccatcgacgagtgctgtcagtgtcagaaggcggtccggcatcagcacggccggagacgtcaaaatcaacagcaacagcacaacaacaaacagcagcaggcggccatatctgtaaagagttga

SEQ ID NO: 439 - DNA, 2139 bp, Aedes aegypti
atgccatacttgcagctaccggacggggctagcattatagtgcagaaggatgccaagggaacgatcacacacgccaacaagggcgtccggcggatgatcgtcgtgaacgatccatcgccagcagggcacaacgcagcgatttttatttcttttttctctcctctaacacacaaaatacttcacctaatcacggaaacggaaacactttgtatatacaccataaccccggaatttttacaaaactcaacacgaaaacaaccacacacatcatcagatcaatctaactccgctctagccaacggaatcatcgactcgaagaccaagaccatcctgaccacaggcgggaatgcggcgttcatgtctccactgggaccgattcagctgacggccgaagaatgcaacgatattctgatgaagcgagctgcagccgctgtcgctgccaacaatcaacatgccattacgaccaacaccaatgatcaccatgccggtatgtgcacggatgaatcaattgccgttcaagtgcagaaagttatccagggtttggaggaaaacgatgattcggaagccgcaaccactacgcatcagttgaagatagagccaacgttgagcatttctcccaaactagaagcgaatgagtatgtccacgactcggatacacctacgccaaatgtagtgcccaaagagcgtccctactcttgtgatcagtgcggaaagtccttcttgttgaagcatcatctcacaacacatgctcgtgtccatactggtgaacgaccccatgtgtgcgtgcactgtggcaaagatttcgcccacaagcattgtttgaacacccatctgttgctgcactcgacagaccgtccctaccagtgccaagaatgtaaaaagagcttcacgctgaagcatcatctgttgacacactcgcgggtccacagccgagagcgaccctttgtgtgccaagaatgtggtcgatcgttcccactgaagcgtcacctggtgacccacagcaagttccacgccggagagcgcccatacgtgtgcgaggactgtggcgaaagttttgcccaaaaggagcatctggtcatgcactcgcggttccacggttccttgaatccgtttgtttgcccggattgcggggctaccttccctcgtaaatttcaactggtgaaccatggtaaactgcacggacgtattccacattcgtgtaccctgtgcggaaaggagttcctccagaagcgaacattggccgctcacatgagcagggcggtaacaggtctctcagaaactccaaagacttctcgaatttattttccatggattaaaaaaacaaagttccatcagattatccacactttctcaaatggtccagaaatttcgaaacagacccttgcaggaaatcatcagctttatctcaaaaagtttcatcagggatggtatctttataaatttacttttggggtaatctttttttctatttggtctgtgtttttatgccaaagttcgccggaaacgtctccgcggcctcagtatgcctgtcgggagtgcggcagtgccttcaacagccgcgaagcacttgccctccatctgcgtctacacacgggcgataagagcttgatgacggatctttgcgcccttaccgctgctattcccggccatttgttcccagctgttaatcaaggtggcactaccgttgttagcgcaaatcctgtaatgtcatcatctcccgttccagtacaaattatcacctcctccggtcaggtggtacagcaaacgttacaaccacagagtccaccacaacagcaggttcaagtacagcatcaacagacacagcaacaggtccagcaccaacagactcagcaggtacaggtagtgcagcaaccggcgcaggttcagcaggtgcaacaccagcagacggttgtggtcgcccaggcgaaacccaaatcccactattgcggccattgcggcaaaggtttcgcggctaaacatggtctactgttgcacaatcggcgccatccagacggagcctgcaccgtgcggacacacgtttgcgaatgcggaaaggccttcttccagaaaaaccatctcatgctgcatcaacgccagcatctggagcaaaatcaacgaacgggtcagggccaggcgcag

SEQ ID NO: 440 - DNA, 1026 bp, Aedes aegypti
atgtacatcatctgcgacgcaaatgccacatcccacacctcaccgctccacaccccgaagtcaccggttaatcagctcaagtatccgagctatccgccatcgtccccgcagcacctgacccatcaacagccacagtaccagcagcctcagcagcagcagggtggttcctcaactgtggccttcagcgggggtcgtgccgttctgccccaaaaacaacaaccggctcgtcccgtaagcgccccatactatcaacagcaacagcagcagaaccgctactcttcgccatcaacggcttcactggcctcaccccgttcgccccatcccatcggtggtggtcaaagccctcgcggttgggcacacgttcaatcaccggttccggtgtaccgtccgacgcctcagcagcagcagcagaaccagtaccagcagcaaccgtacgtctcaccgccctttcaaacgcaaccagccccgtaccaacagcaacagcatcagcggccaacttccggcgccagtgctgggtacgggcacggttacggaccgagaaagcccgaaccatcaactcaacagccacagtatcaaccacaaccgacgcaagctttccaaccgctagtgtcttcacagcaacaacaacaacaactttatcagcagccagaggccatcccccaacaacaacaacaacaacatcaacagttttatcagacaactgcagcggacagtcaaattccattcgtgaccactctccgcaaagaagcaccaatgtcgcaggaaccatctcccgtctatcagagcgagcctgttgctgcaatctatcaaggcggtaccaatatgcgcggggatcagaaatggccaccggcggactacaagaagcaatctgatttggagaacgaagagcgccgaaagcttgcccagcagcctgccttccgcccacgcaaagtgcaaaaagattactccgactttttcgccaaaaacgccctcaacgcaacctatccaggctaccgggcaccacccggcactcagcaccattcgtaa

SEQ ID NO: 441 - DNA, 3095 bp, Aedes aegypti
atgataaagcctctgcagctgcgagccgtttctagtccatcactcacagagccaacgccaccggcgacggttctcagagaccagccggacgacagccatgtgaccaaaaccgcagattctcgaaatgtggccaaccacatccaccatcataatcaaccacagaccaagactgcattgctgagcgccaaccagaagaatctgcaccactcgcagcaagcttccgagagcgtgctgcaaaagttcaagaaaaccttttcccagttcaaaccggccaaaggagtgccaccagtgctggcgtccgccaacagtaatagcctaagcagtagcaccagtagtagcaatagcaatcacccgcatcatctgatagtgaacagcggaatgagcctggacggaagaagtcaggaacggccagttttgcctccacccccgccggtacagtctcagcaaacgagccaccatcatcggttcggtccgttgatatggcgatcgagcaaagagcggcggaaaaccaaatcgcaccggagggataagtgcaacagcggggactcgggcattcaggtcgaactggaggccgatgagcagctgctgcctgatgcgggaatcgatggaacggatcccatttcgcccaactccgtgacggttcggcgggccaactccgccaaagtgtccacctccggaggtccatcactgctcaagcacaaactatcgctcaaaggaagcaacaaggaaaacgtggccaacatatcacgcctaagtggcaaatcgcgcagtcagccctccggactggaccgactggccggcgatgaccacgacacgcgcctcagcgaaaccgacagtgacgacgaaaacgacgacggagtggatcaacgacgacacgacccccgtcgaggaatccgcgagtcggaaccggtctttgcggaagtcctgttctcgttccggcccgtgggacctcaggaactagccctagagaagggagcactggtggaagtgctaaggcgggaagctggtccctggtggtggggccgaatcaaatccgatgccattctgtccgacgagcgggaggaacaggaccgcaccgtggacaactccgactgcgggtggttcccgatggatttcgttaaactgttacctacgtacaataagccaaaacagatcatcatcatcaacaacagtagcaatagtgggctcgaagaagctggtattcagaacggggacatgggaaagaactgtgatatgctgcaagatggcgctgcgaccatgctgccaacggaactcgacggagcttcggcgccgaacgagccgatgggaggtgctagtcaggagcaaacgaaggagaacgtgatcaaggaactgctcgagacggaaatcaacttcgtcaagctgcttaattcgctttgcttaggatatatcaaacctctgagggaacgcgaggatgttttcccggcggagagtgtgaacattatcttctcgaatctggagaaaatttggaggtttcagcagacgtttctggatgcgcttcggatagcggtgcccgccaataggattggcgaagtgttccttgaatatcaatcggcatttatgatctactcggcgtattgtaactcctatccacgtgctctgatggaactggaaaactacaccaacaacaaggaggcgtgcaccatcctggagagctgtcgcgtgtcgcagaatctcccggagctgcccctgtcggcgcacctgttggcgccgatccagcgcatctgtcgctacccgttgcacctgagcgaactagtcaagcatacgccgacgcggaaggagctgctgccgctgctgaacctgcgcaagtgcaccaagtccgacctggaaaccatggactgccgggaggtgttcgagctggccctgaccgcgatgaagcgcgtgaccgagatggtcaatgaaggcaaacgccacagcgagtacctatcgcggatgcagtcccgcttcgagaatttccagggcccatcgatcaacgtgcacagcacccggctgttcctgcaaaccgacgccatccggatgactccgaacctttggaacaacacctacacgctgttcctgttcgaccgtcagctcatctactgcaagaaggatctcctcaagcggaccaactacatctacaagggccggatcttcctggacaactgccggatattgaacctcccggacgggaagatgttcggcgtaacgctgaagaatgcgttgcggttgtactgtgacacccggaacaagtggtttgatttctgcttccggagcagcagcagtaagctgcgcttcctgaacaccctctcggcggaacggcagttctgcggcgaaagtctgttcgtgtccgagctggatggggcgtgcgtagacgacgataacctgtcagatcgtgagtatttccccttcaatgacgaaaaggaaggatgcagcaatacggacacggaaaccagcaatggcgcagatttaacggacagtatgcagttccttttggggaatatgtcccaaagtgccaggaccagcaattgcagtgtgctcaaagaatctcccacgaatataggcggtaagcagtcgggaaataccctaccgaagaagtctcgaaaatcatccaaagaacaacagcaacagcagcaaccagtagaatacaattcgcactccctcggacgacgaaaactgggcaattggttccgcaaggccaagagtacgaatagcaccccgtcgcagagtccaactcatcatccgatggcgctttcgctagccgccgtcaaccacgtgggtgcgtcggatagctcttcggccagcagtccaggtctgggataccatcaccagcgaactctgtcggctttgtccaccggtaatggatccaacccctcctccttggccaaaggtaaatctaaagataacctcatgactcagtcgtccatcatatcgtcctgagggtacgagagcacgctgctctagttctaagttattcatccttcagtcgcaaggaaccaaacacacacacacacacacccaaacactcgagcattgtcacaccctcagaaccataagtgttgccaaataaaggaaggattttcacccagtttagtcaagtc

SEQ ID NO: 442 - DNA, 4343 bp, Aedes aegypti
atgacgcaatcgctaaaatcaggattgaaaccattcaaatgtccaatttgtgaaaagtgcttcacacagcaggcaaatatgttaaagcatcaactattgcataccgggcttaaaccttacaaatgtcccgtttgtcagaaagcattttcgcagcacgccaacatgatcaaacatcagatgctacacacaggtttgaagccttataagtgtccagtgtgccaaaaggccttcactcaacacgccaacatggttaaacatcagatgcttcataccggcttaaaaccttataaatgtcctgtatgtgacaaagcatttactcaacaagccaatatggttaaacatcagatgcttcatactggagtcaaaccgtacaaatgtccaacctgtggaaaagcttttgcccagcaggcgaacatgatgaagcatcagatgctccataccggactaaaaccatacaaatgtagcacgtgcggtaaagcgttcgcccaacaagccaacatggttaagcatcagatgcttcatactggtattaaaccgtacaagtgcagtacgtgtggtaaagcttttgcccagcaagcgaacatggtcaagcatcagatgcttcacactggagtgaaaccctacaaatgctcagtgtgcgacaaagcattcgcacagcaagccaatatggtcaagcatcagatgctgcacagcggaattaaaccatacaaatgtcccacttgtgacaaggcttttgcccagcaggctaacatggtcaagcaccaaatgctgcacactggtgaaaaaccattcaaatgcaagagctgtgataaagcattctcgcaacgtgccaatcttaagaagcatgagatggtgcatctcggaattcgtccgcacacatgtccactgtgctccaagtcgtactcgcaatattcgaatctgaagaaacatctgttggtccaccagaagcagtccatgaagcagcagcaacaaaatggccaggttatgatgattctgtacaattgtcaaacctgcaaaatgcagttcgagaatatcctcgaatttgaaaggcacaccaagcagtgcaatgagctgaacaatgggaaccatggccttaagctggaacagatcaacataaagagcgaaatcgatatggatggcagctctaatccgggaattgcccagcacatcaccatacctcacagtcaatcccagccacaaatgcacataccgtcggcgatactgacttcggtgatctcatctgcttcgacgataggtaacggtcataccttaagcacgagccacattcatcatcctacaaccggccaccagcaacatccacagcaacaacacactcctccagctgtgatcacacaacatcaacagcagcaacaacaacagcaacagcagcagcaacaacaacaacaacagcaacaatcggctgctcaccagcaacaacattctccagttggtcatcaacaccttacgctccagcagcagcacaatttacccatccatctccagcagcaactctcacatcacctgatatcctcacaccttccgcaccaggatcacgttacggcagacctccaccatcaggtaaacttccatcatccacatatctcccacatcccaaacctaccgcacaagatcctatccccattattccacatcccccccttcaacaacaaccacagtacataatggaacgcacggcggggatccccactgagtggggaatccccagaacaggctatagctaagagtccttccgcgtccgattctgctgctgctgacgactccgttgattgtaggacaccaacaacgccacctcaataatgcttgaccatgagcagcaaacagtaactctaatcaaaactagatacgacagccaaaatgcaacgttgatggcagtacactactataagaatactcagagagtattactgataaaaaaaaacacggcaatgaatatgttgaaacagttctactattattaggattctagtgagtaaaaaaggaaactactgcgaacgttgcagtagattaacgcaaaggctttctctaactgattttttttactattgaatagtacgaaaggcacaacacggttcagttgttgatgcagttgaagttgactaggaatgtaaggaacacaaagagggaattctgattgttgataagcatagcatgttacttatatttgcgtggtagtggtcgtcccgtgcgaacccatgtcacactgtttcgttttcttcttacaacactacactgtgtgtgctgtaaaggatcgtgaaagatgattaggcgcgcccattttttgggagtgagtctctgttatagaagctgatatatagatggaagtacgaaacaaagaaggatcattagttagaatattgaaaagtcgataaggcgaaaagatgagagaccaagataataaagtgaaaggattgtgattacgaaagtcgtgaagttttcgtattcgttcagcaacctgatgtgatatttttccgggacatgagcagggtttctcccgacagcacactgcgacggatgaagaatggttaatctaagaaaagggaaaaaaggactaacgaatgaggaatgatatatcgatgtgtcacttgtttggttttgaaacgattttttattgctttttgtttatgatgattgtagtaggaaaacaccatttagaatcatggttgagcatcgaagaatttacaatgctattaggtttttcgataattagaaaagcatatgtaacgttttattaaggtaaaacagcttagaaaccaaatacaataatgtgccaaaacttcaaaggcactcatatcgcgaaagatgcatcaaatcgcagtgcaatttctattttagctttttacattgggagaaaataaaagatgacttcgtacgttaattatctttacttttacaacggcattattatttgcccgaggtttcgacacgttgtcgtttacccctttaggaagtcgcaattcccatgtcgaaacgtcgagcaaacaataaggctgttaaaaaaaataaaagcagcttagtcaagaaagttacttgatagctttttattttttatggaatgaccaatgctgaaaactatttgttccaattggtattgaatgcttactaaacagtcattgttcagctcccacgaacagtttgaaatgtcgaagaatggctcaaaaccgataaatgaacttattggcggatctatttatttatttgatttatcaaacgggcccactagacccatatactctttgattcagtatagattaacacgattgtagacgcataggtttgccagtacagagatttgcttactaactttcgtcactaagtaccatgcccacacagttacggatcacccacagtgacggatcactttggcgttcaacatcggataactcgctcaaaacataaacgttggcgtaaaacatatttttcccatgttatactatttgtcttccaccatttgtaatgttgagcacaacattcaaccgctaaataacggtgtttttggcaaatgtttagttggtaccacacagctatcattatatggtcgttttctgtaagaagtgccgtcagcattcataagctcccacaggtggtaaaattcaaatgttatagcatgttttatgctcgttcgcttcgatttagtataaattcatctttggaaaacattttacttgaatttttattcaaaataccgaatattagcacttctaactagtgatccataatatggaccaggaaatgattgtttaccacggttatggatcacttccaaagaatgtagatttctgctattttatgcattggattcgacatttttagacaacagcactaaggataaaaaaaggcttgtaaatttcaaattttagcagacaaaaatgggtggaaaacttggtgtggagcggaaacagttcatgtctcagttactacaatgcagtatcacaaaaaaagggcattttacccttgtttccagctctaacactgctattttttgcagtaatatatgacacattgttaactttcgccataccatgcaatacagatgcattgagttgaaaatatcttgattttgcgcactgatccgtaatatgtcacaatttgatccataatatgaaaattgatccataatatggttttcaggaaccgacacaatttttaatttttatgcaatcctatgtaaatattacactcaaaacagtttactaaccgaagttccaatttgaaacgattcgattcgtgcttttaaattacaattttacgttttccatgtcgttttattgaattttataggttggactccacactatttgatccataactgtggggtcatggta

SEQ ID NO: 443 - DNA, 1604 bp, Aedes aegypti
tccggatagcggaagttcagattgaagaggacgacggtttaccccaatcggtgtgcagtacgtgtttcacggacctaggaaagctggaacggattatgcaaaagtgtagagaatccgaccagcacttccgggcaaatgtcgaaagcttgaaagaggacttggtggaatccgttgaaatggtggaaataattgaagacgattcggcttacgtggagtatgtcagcgaagatgacacttctcagccggtagaaatagtcggtaccccatcctgtgtggacgacctgatcatcgtggacccgatggcgcaagtggccgagagccaggaagccaattacacccaatgctgtggatgcgtgcagagttttacgacccacgaggaactgctgaggcactcgcagctttaccacaaatcggaacgcggcatctgtggcccagtgccggacaacttgatagagtgccgggtgtgctacaaaatgttctccgggattctctatctggattccatgcatcggttgaatgccttcaaagaccgcctgagttcggttggcttccctgaagagatgcagtgctgctcgtgcgaaactatgtgcttcagtagtgaggaaatggttctccattcacaagagcatgccggggaccggacggaacacgacccggccaagccgttcgaatgtgaaatctgcttcaagcggtacaacaagaaacagaccttgaacttccaccagaagttcggttacagttacaagaagcaaatgaccaccagaagccgaggctgtcgcgccatcaggaagcgtaccgaaatcgaaagctccggggacagccggaaatgctgcggatgttcggcggagttcacttctgccgactcgttgaaacagcactcccagatgcaccatgagttgtatcgtcgtcaatccgatccaagcaatgctccattcgaatgcgaagtatgtttcaaacgattccccactcaaattaagctggagcagcatcggttggttccctacaccctgatgcacaagtgtcccgaatgtgataaatccttccgctccaaatcggtcctcaccaagcacctggcgagtcacgagctaccaaaaatcgttccctcacgatctcccacaatctcagaacctgctcagtgcgaagaatgcggccaattgcttccaaacgcctacagacttcgcgcccacatgaaatcgtcccactcctcggagaaacccttcagctgcagtttatgttcccgtcgcttcaagtggaagcacagccttcagaaccacctgcgggtgcacaccaaggagcagccctacgcatgtactcactgcccgaggaccttcgcgcagctggcggacaaaagcagacacgagctgacacacagccagaactatccattgcggtgttccatctgtgggaaaggattccccgccgggaggaggaaactgctggagaagcatcaccaactgcatcagcgaggcgaggagtatccgtacacgtgccagttttgcgaccgaacctttacccggctgccgcagcgaaatcggcaccaggcgaggcacgttgccgagcggaacagaaacatggcaatggtggtgcatgtcgatgcggtttag

SEQ ID NO: 444 - DNA, 1999 bp, Aedes aegypti
atggcaccggctaagaaagctgccggcggcggaggacgcaaaaaagccgccaacggttatcagatgcccgagccggttcctccggggacagtgctaaccgacatggccaaacgacaatggaaggttggaccttcgatcggaagcggcggatttggtgaaatttattgtgcttgtgaagtcggttccggcgtgaagaagccggacgattatccgtatgttgtcaaaattgaaccgcatggcaatggacccttgttcgtggagatgcacttctacatgcgcaatgccaagcaggaggacattgaaaaatttaggaaaggtcacggcttgaaacacttgggaatgcctcactttgtcggtaatggatctcacgagttgaaaaatctaaaacatcgattcctggtgatgccccgatacagcaccgatctgtggggtatatttctgaagaacgaaaagcgatttccgttgcacacagtttatcgcatagcccttcaaatgatcgatgtcatggagtacattcacgattgcacctacgttcacgcagatttaaaaggagcgaacattttgcttggttttggaaagacggctagcaagcagcagttgttcctggttgatttcggactggcaagtcactataccaacaaagacttcaagccggatccgaagaaaatgcacaacggtacaattgagtatacttcccgtgatgcccatcagggagttccgaccatgcgaggagatatggaaatcttggcgtacaacgttgttcagtgggctggcactttgctgccctgggaggctgagaaactcttggccaatcccgttaaagttcaggaatcgaaggaaaagcacatgaaggatgttggtggtttcatgaagtattgcttcaaaaaggacattcctaagcctataaacgaatatgtaaaatacgttgcaaccctgaagtacaacgataaaccagattattcaaaatgcaggaagttcttcgaagctggtctcaaggaattgggaaaatcaaattcaggagacttggaattcgaagcaaaaccatcgaaagctgcaacacctgccaagaagagaattgctgaaccggactctacagaatcatcgggtccgatggctcgaccacgcggtcgaccaccaaaggtcatcagcacaagtcccgatacgacatctaaagacgaaccgcccgccaaacgaaagcaggaaacgccctccaaacctgtacagaagaagaaaaagcccactgtcgaggaatcccccgcgcccattgtcaatggacacacgtctacaccgtcgtcggaagtggtatccgctaagctgtccgcccaagaacaaaccggatcgattcgattgaatacgaaggtcggtggaggcacacccaaagctggcagcaaggttaagaaaacctacgccttcaactttgaactggacgtcagcattgacgcggatgtgatcgtcaatgttcgacgaaagaagaaggctcccacagaatcacctgccttggaatcgatagaaccgtcaccggcaacacgaaggaaatctccctcgaaatcgccttcgccggccgttttgccgaagcgatcccggcgacagaatgcctccatccaggaagagaacagcatcatatcgctgaacactaccgagggagatcagtcctcggtgcacccggacgacgacaccattccgaacagtgaccccaacacgccggaaccgcgctatctggcatcccggtcgattgtgaacacaccacaacggaaggtggccgcagctgtggggcgctccaatgctcgtctaggcgaggcaccagcccgcgccggggagtacaaaggcaagaaggccaaatcgtaagctaggtatgcaagtatttcagtgtactaactgtccattctaattttctttgaatctactatcttctttacgtatttagtgttccacatgttgataatcagtttcgattaataaatttagctaacgtgactgctctctccgtctgcgggtaccc

SEQ ID NO: 445 - DNA, 3258 bp, Aedes aegypti
atgcgtgaagccttgttcagccaggatggatggggttgccagcacgttaaccaagatacccagtgggatgtaccagcctcacctgaacctgccaataaagatgctttgaaaatgaatatcaacaacggaacagaactatgggaaacgaatcttcgcaacggtggccaaccaactcaacaaccaacgcagaaaaccccctggggaccatcgaacaacattggtggtacatggggagtcgatgatgatagcaatgccgaaaacaatagtgtttggaccggtggagccactggtggtgcaaaccctccagttgctggacaacagggttggaatcaaaataataacgccatgtggccaccaaatgttgcgaatgcaccacccaagaaagaacctgaatggagcggcaatgttccagtaccgggaggagctaacaactgggagaatcgtggaacagctgctccacctccaccacatatcccagctccaccactagatatgcccaatgtcgacatgcgtaatatgcgcccaccgggtgctattgaacctagccgtgaattccgtggagacccaagaggtatttcaggccgtttgaatggttcatccggtatgtgggatcagcatccaatgcctaatgctccgctcaacaagatgccacctcaagcacctatgttgaatgctgcgggaggtaaccaatggccggtaggagctggtggccctcaaaatgtaccgccatctaaactaccaacatcatgggatgaagcatcaccccctgctagtcgtcgtaatatgtccaatttggatgatgggacctccctctggggagccccaactaatcccaatcgtcctaatgggcctaatgatggtatggtacgtaatggaagaaatccactcggaggtaactctggtccgattgggccaggaggaattggtggaccaagactcagtggtcctggtaatcccatgaaatcagacatgtggggtcatggaggacccggcgcaatgcgaaatggttcgtgggatgataacagtaataattgggaagacaagggtccagggccacttggaggcggtggtggtggtaatgctggtggcgctgggggatctacttggaatgatggacctggaaatccatcgacatggaacaacaaaaaaccaattgttcctggtggaaatgtatggccggagacttcggatctcatcggaggtgactggggtgccggcatcggcgttggtaaaccaccaaataagcacaatccacaggagataattcgtagcagcaagcagttccgtatcctctatgaaatgggcttcaagaaggaagatatcgaacaagctcttcgcacgtccaatatgagtttggaggaagccatggaaatgctgcaacgcaacaacggtaacaatatgcccgattggcgtcgtcacgatgaccatcctggaggattcgagccaccattctcgggtggacgtttccccggtggtggtgctgggccatctctaccgttccctcagaatcaaaatgggcccaacaacaatatgccagctggaatgggcagtggaaatccgaatcttgcaggtttgaatgcactgagcaaaccattgcaaagctatctcaaccaagcaccaccatccggtcctggcccattcaaccaaggaggtccaaatggcggagttggaggaggggcagccggcattcttggtggcgctggggctggccaaaactcatcagctcaaccctcgacgcaacagttgcgtatgttggttcagcaaattcaaatggcagttcaagcgggatatttgaatcatcaaatcctcaatcaaccgttggcaccacaaacgctattcttactcaatcagttgctgaataacatcaagcaacttcaagtgacgcagaataatctacagcgaggtggtggtggcggtaacaatcagatgtcaatgattccaaaaataaagcaacagattgctggactacaaaaccaaattgctactcaacaagcaatttatgtaaaacaacaacagcagcaacagcattctggaaacacctctaatattaatcacttggcaaacaacttccatcgtgaacagaacgatttgaccacacttcaaaatagtttatccgaaatgggattaggaaaggatcataatggcggtggcggtggcggtggtaacagcggtggctcaactagtcaacagtctcgactgaatcagtggaagttgccggctgtggacaaagatgcaggtcatgatttgactgatttctctcgtgcacctggaaccacagcgaaatctacactctctactaccgggtcaagcatcagcggtttgagtggtttacaaggagacaacacatggtccacgggccgcggaggtattggcgatggctggccagactcctcgaccgaaaccggaaacaaagattggcccgctactcaagatacattcactgatctggttcctgaattcgagccgggaaagccatggaagggtacccaaatgaaaatcgaagaggatccaactattacaccgggaagcattgctcgcagtccaattgcgtccatttcgattggatcggccaaggattcagacttgtttgccaatagtagcaagccatctccaactgattccatcagcttgtcctcctctacttggagtttcaatcctggtaacaacaatttctccagctccatttccaaactgggtggcaacaaaaatacatggtctgatgccggggcctcggatttgtggggaaccggtttgggtagcggcacagctggtggtaaaacgccacgtggtcccccaccgggtttatctgctggtaagaatccaggaggattcgggtcaaatggctggaatcaacgtccgggaccaggaggcaacaattggccaaccggcggcggcggtggtggtggtccaggctggtattcaacatggattttgttgaaaaatttgactactcagatcgatggaccaactcttcgcacgctatgcatgcagcatggaccattgcaaaatttccacttatatttgaaccatggaattgcattgtgcaagtatcaatcccgagaggaggccaacaaggcccaacaggcactcaacaactgcgtattgggaaatacgaccatttgtgctgaatctcccacagagagcgaagttcaaactattctacagcaccttggagttccagggggaaacaacaacaataataataacaacaatggcaacatgggctctgctggtgggcttggtaataacaacaattcc

SEQ ID NO: 446 - DNA, 2568 bp, Aedes aegypti
atggctccaaatagcctcctgggatgggatatcaccctaggtcgcctcagcgtacttgatcacgtcgccggcctcactacgtgggatgtcttccgttcaacgctttcggaagaccagctggccacactcggattgttaatttcttcactgttgaaactattatggttggcgctatttgtgacgggtgtggttcgtgcaacgagtaaactcggacctgatggatatcaagattcaaagcctagtactccttcaaatattggagagcacatctgcatagctggaggagtgtggcctaattgcgcatcacctaccacaccgataccagtaactccgaaacccacgactccagcgccaatcgctacatcacctaagcctagttgttcaaatggaggatttggacctaactgcgtgctacccacaagaccacctccaccgcagataagttgcgcaaatggagcaataccaccattctgttgtaataatggaggagttggaccggaatgcgagattcctggcccattgggaccaccatcgataagctgtgctaatggaggagttccaccgttctgttgtgagaatggtagggtaggtccagactgtgaaatcgcgttcccaattgcgtgtgacaatggaggtgttccaccatactgttgtacaaatggtggatttggacccaactgtaacattaagcaaccaacatcaccttctccagtgtccattccagaacctttgcaaacctgttctaacggtggaatcccacctaattgtgagattccaaggcccccgtcctgttctaatggaggaattcttccatattgctgtaccaatggaggtagtggaccaggctgtgaaataccaacacctccagcttgcccttacggtggagtacctccgttttgctgtactaatggtggacaaggtcctttctgcttaatcgtacaaccagccatcgaatatggtccagcagttgaagtgatttatcaccctcctagccatggaacttcatctgtagatagctcttacttctatccagcgccttgtccttacggaggcattccaccttattgttgcgcaaatggcggaattggtccgtactgcgaagttccagttcaacagataggctgttctaatggaggccaacctccatattgctgcaccaatggtggagttggtcctgattgttttattccacaacctcaaccaccagttcaacaaataggatgctccaatggaggacagcttccttattgttgcaccaatgggggtgatggtccagactgttccatttctcaaaatccaattcaaccaatcggatgttctaacggtggacagcttccgtactgttgcaccaacggaggtgacggtccaacctgcactattgctcagccatcctgttctaatggaggacaactgccgtattgctgcacgaatggaggtgtaggacaaaactgtaatcttccaactactcctaaaccaactacaacaacccgtagaacaacgaccacaaccaggcgtacgacaacgcgcccgcaaaccaccaccactcgccgaacaacgtcaactactcggactacaactagggcaccgacaaccactacgcggagaacaacgactactactcgccggccaacaaccaccacccgtagaataactacaacgacccgtcgaccaacgactacaactcgtcgtccaacaaccacaacccggagatctacgactacccgttctccctcggtttgtcctttcggtggcagccctccattctgctgcaccaacggaggtctaggtccaacatgttacgtaccaaccgatcgaccaaacactagtcctcgcccaacgatcataaccacacgccgaaccactcctacaactcgtcggacgccaccaactactcgcagaactacgccaactactcggcgaaccacaacgactactcgacggccaacgcccacgaaaccagtttgtccattcggtggaatccctccgtattgttgtaccaatggtggacaaggacctaactgtgccgtcccaactagacctccaactagaccgccaactcggccaccaacatgtccagccggaggaatacctccatactgttgcactaatgggggacaaggacctaactgtgccgtcccaactagacctccaactcgaccaccaacttgcccaggaggaggagttcctccgtactgttgcaccaatggcggacaaggacctagttgtgttgtaccaaccagaccgccaactagaccgccaactagaccgccaactagaccaccaacgcgacctccaactaggccccctacctgtccagctggaggaatccctccttactgctgcaccaacggtggacaaggtccgaattgtgtagtccctactaaacctccaacctgccctgccggaggagttcctccatattgctgtacgaatggaggacagggtccgaactgtgccatctccaaaccctcacctcctacggtgccaggatatctcccaccagacagcagcaatcctgtcccaagtggttacaagtacgacgtcggtgatccaccgtttgcaacctaa

SEQ ID NO: 447 - DNA, 1881 bp, Aedes aegypti
ccctaactgcgttttcgtactgtttgttacgaaaatcttgtgtaactttgtttcacagtgataacataacgcaggcacgaaaaacatcattgaaattgatgattgtttatgtttgcggccttgacttgacagtgccagctactgattgaaaaaataaacaccctcatccaatcttgtttcattcacgcaaaattttcattcaatattttaatggtttttcaaatcaaaaaccatcacaatgagcggcagccaagacttgaacgattcaattcgaatatacaatgagcagcttgcccaggtggaacaagctttggagggcacaagctctggcccagaacgggaatctttgattaatttgaaaagtgatctcgaggagctggtgaagctcactctcgaaacggtccagcacgagaatggagatgacttgaatgccgcagcttccggcagcaacgaagacgatgagttcgctctgttcatgcgggaaataaatgcattggatgacccagggagtgtagatgcaaagcctcccaaaccggatgaagtcagcgtggatgaacaagaaccgttcaaagatctggtcggtagtaagtgctccgctccgcatatccataagtggggatcgaagtcctatcacaatgctttgatatgcagtttggatgcttctgatctggatgatgttgcagccaaggtgctgttcatcaatccgacccatcaggagatggttccgtgcgcctatttcttggaaggagactgcaaattcaacgatgaaatgtgccgcttctcgcatggtgaactaatctctatcaacgaactcaaagagtatcgcgaaccgagatttgaactgctgaggaagaaaggttgtaaagttttggccaagaacagaaatcgcatttggagtaaagggacgattcagacagcggattttgaaactaaaacgtgcaagatacaaatggatgaaggccggcacgaggttgaattgcaatttgagaacgtgctaccattagagggcgatgatgtgcccagttctgattcggagtcaaattcagatagtgatgaggaaaacgaggacgatgttgtctcacttcaacaggcacaaattatcgagcgaagtcttttgaatcccgctcctgaccaacggttgggggattgggaaaagcatactaaaggtataggctcgaaaatcatgcttaaaatgggctatgtagtcggagccggtctcggaagcaaaggcgaaggaattgtagtgcccgtgagtgcacaggtacttccccaaggcagatcgctggactattgtatgcaacttcgggaacaggccaatggagacaagaatttattcagcgttgaaaagaagcttcaacgggagaagaggattcaagagaaaagggatgcaaagaactatgctgcaaataaaagcaaaaaggacgtgttcaacttcctcaacagtgaaatttttggttccagcaatggttcctcaagttcatcgggaagtaagaaacccgcagcgaaagacaaccagatggacctacccagctgttcatcgaagaatttgaacatcgccagtctgaagctctccgagcagatgcgaaggctggagttagatatagaccggttgtctcattccctgacgcgtcatcagccgggatcaaagatgcattcaaatctacagaagcagatcgcagagaaacggcgggagatttctgaaatcaaaaagaccgaatattcaatctcccgagagcaacagttacgaaatgataaacgtaaaatgacagtattttaggaatggaataaaacaatgcaatgcataactgagataagaaaagggagatgttacttgttggtgatgacatacattttgaactcgactctatagatcaggcttgt

SEQ ID NO: 448 - DNA, 4631 bp, Aedes aegypti
gttctattcaagagaagaaaacagaaaaatcgaaaattgattgaaactccgtaatgttattacaaattgaatttggggtcaattgcacagacagcaggctaaatagggaaaccctaagaatgtgttatgatttgctgacatcttcttcgcgcatccttaagagctcacagtgaagcaatcgaaagaatatgatatgaagcgcttccgagccggccacatgctgataggcacacacatagtgtaaatcataactctacgggattccccagcgcttgataggattacagtccaaaagtaacttccagcgttacagcttgattatttttctcactctgtagactgatctcgacctgttcgctgtcagtaattcaagagtgcgaatgaaaacattaccgtagtgaaatgataatgaagagtgttatcgttctggtgtgtagtttaatagtcgtggcaaaatgtcagagctcgagtgtgctggtcatcggtccaaagtacatcagaccaaggcatccgttcaacgtggcctttgccaattcgctcaattcaaatgtgaacctcaaactaaccttgcaatgtgacggcgataatggatttgtgaagaatgcatcgctacggctcaattatcagtcggcaaaatccttcagttttgatgtcccaaatatcaccagcgggactgattgtaccttttccgctgtcaacgacggtggtagtgtaatggtggaccatatggcgaatttactgttgccagcaaagacactatctgtgttcattatcactgataaacctgtctacaaaccaggcgatatcctccgatttcgagtggtggtggtcgatatcggtacaaaaccggtaaaacatatggagagtatcgtgatcgaaataatagacagcgacggcgcatttaagagggagtggttgcaagctaggcttttcaacggagtattcgaagccgcatatcggttgccgtcagttccggccttgggcatatggaatattacagcgacggccaatgataatggtttcgaaaacacgaaagttcaagattttgaagttcgagaatacgtcattccaaaagttgtcctcaaagtagtaccttcacgcactctgctgatcgctgagaaagagatcagcttagacgttaaagcgcactacacattcggagagccagttgaagggaaacttcgagtggatctgttcacaaatccattatttcgtagagccacgcatagcgttgaaaaatctttcaacacgaatgcccagatcaagttcaaattggacagggaattggctttaagggatgcaaatttttgtatggtgtctgccaacgtttcgctgacggaaaaattatcaaatgtaacaacggttgttaccttggaatttcccgtatttcgacacccgtacaaaatcgagctgataaatcccgccatgaactatcggcctggtgtaggctatacttgcaaactatctgtcaaagatcattttggaattccagtggacgcacaaggtaatagcataacggtccaatctgatacggacagtgttactggacaattggaccgtcaaggaatggcaactctaacgcttccgatgccagatagtgaggagacggtattaatatcggttgtatatgaaaatgttgaatataataagattatagaagtcgaagcctcggaagatctatcaacacaatacttgcacatttccacaaaaactagaattattgtcggcaatagcattacgtttaccgtcaactccaatcaacatttcacgcatatgtcctactttgtcacaaactggggaggaattctgtttgccggacatcagaagttcagcaggaagaaaactaacacgatcagattcaaactaacagccgcaatgagtccatactctaggctgcttgtctacaccatcagcggaggccaattgatcatggactatttcgaattggatttcgagttcttcggtaatgagtttgagttcatgctagatgatgcaaactaccgaccggatcaggacatttacgttgacgtcaaggcggagaagaattcctatttggcttttcaggcaatcgaccaaggtgcccttctactgggatttgacgaatttggactcacgaggaaacaagtgcaggaagatttagcatcgtacgttgacgccgatgaagagaatcggctcgaccttattcattcgttcggtcttttcttaagaagtagtttaaatgaaaccaaaacccaatcgtcacgtgccaagcgatttgctcccgaaagacgagatcggccatatagaaatgccatacgtctgaggactgatttttcggaatcatggttctggaaaaacagcaccatgaagaaccaaaaaacgcaaacgttccatgacgtggtgccagattctattacctcctggtacgtgaccggattcgccctgagccctaccctgggtttgggactgatgcatgctccccggaagttcacggttacgaaaccgttctacatggttgccaatctaccgtactcgataaagcgaggtgaagtagtccggatacagataatgttattcaacttcctgaactcggacttgacgacagacgtcacactgttcaacaaaaacgacgagatcgatttcgtggatcgactttcgaacaacccacattttcgcacgaaggccatcatagcaccgcacaaccaggtaaaatccgtttcatttttgataaaagccaaaaagttgggggaaatcgcgatcaagatcgaagccgtcaaccaattggagtcggatgggcttgagcacatgcttcgtgtcactccggagagtcggttgtatgagaaaacggaggcaagattcattgatctccctactagaaataaaactaactttccgatcacctgcaacattccacgggacgctgatccaggatcgaccaaaatcgaagttttaatagaccctccacttatgggatttttagcacgaaatacaacagattcattgttaaaaattcccaccggtgcttccaatttgaacctactgacttttgttcccaatattgtcttgttggaatatctcaaagaaaccggtaaggttacacctagtattgaaaaagcaagaaattatgtttccagtggatataaaaaccagttaaaatacaaacactcgaacggggcgtttggtcaatggaacccaccaacagggaatccaagcgtatttctgacagcattggtggccaatgctcttgccacggcatccaaacacatcgacatcgataaaaaaatcgtcgagcaagcctactcatggatatctggaaaacagaaaccaaacggatgcttcgaagacgacggcgaagttatctacacacctttgcagaacaactcgtcatcctttgcactcacggcgttcatagtgtctgcgatcatggaaaacgaaaatatcgccagtcagtttgctgcagtcgtacagaaagcaacaaactgtttagccggaaactttgattccctcaacaacatgcatgatattgctttggcaacctacgccctagcattggtacgacatgaaaaacgacagatctatctcgatagacttattagagattccatattcgagaaaggcagtagcacggaacgatattggaacgaagagctgaatgttgaaattgctgcgtacgcacttctgagttacctgcaaattggtaacgtcattgataccatgcccatcatgacatggttgaataagcaaagatattccacaggagtgttttctggagttcaaaggacgtttgtcgcacttaaagcacttggaaaaatggctacgtatcttaacacgagtaaaaatgactacagcgtctatatctcatatgacaaacacaaatcaaaattcgatgttttaagtacgaaaagcctggatacatttcatcatgaattgcctgatagtgtgcgtaatgttaattttgctgtcgagggcattggttttggttatttacaattgacataccagtatcatagaaacattcaaaacgccaaagcaagctttatgctcgatgtaactgttctcgatagcagcaattacaatgttcaagacttgcgagtttgcttaagttataagccgaaggaaaaatatactgtatccggagtagcattggttgaagtttatcttccgagtgggctgattgtgaaggaatctactgttcgcgacattagccggaaaatacagagaactgaacgtgctttcgacaatactgccatgtttgtgtacttcaacggattggacacaaattcggtatgcttcgacattactgctcaccgaaagttcaagattgcaatgcatcggccgtcttatgttgtcgtgtatgacaccaatgatatgagtggcttcgctataaaatcctacgaaggcaaagtcctccagatatgcgatatttgtgacgatgaggattgcagatcgatgagctgttagtcattggaatagagctgtgcgctaccgccaatgcattttgttgaacgctgactctaggcaatatatcggaggtgcgataaacaacacgccgccgattttgacgcaaaattatgattcagcaaaagaaaaaaatatttacaattatttgtacagaaaagcttcaaaatatatgttcaaaagtttatacatat

SEQ ID NO: 449 - DNA, 1563 bp, Aedes aegypti
atgcatggccgaggaaatcgattatgtgctaaactatccagcgccttcctgagaaagtggtggtttgtgatagcattcgctttgggtctgctagtactcggagttctagtcacatttggatttaccacgctagttagagcagtaattaatcatcaagtagcgctaaggaaaggaggacaatctttcggatggtggtcaaaaccacctgtggagcccattatacgaatatttgtatataatgtcaccaatgcggatgagtttttgaacaacggtaccaaaccagttctagacgagctgggtccttatgtatatgtgcaaacatgggagaaagttaacatagttgaaaatcccaatggcacaattagttacaaccagaagcgagtgtatattttcgacgaagagcaatcggaaggtacagaggatgatgtggttatagtgccaaatattccaatgctcagtgctacatcgcaaagcaaacatgctgcaaggtttttgaggcttgcaatggctagtatcatggatattttgaaaatcaaaccatttgtcgaagtttccgttggacaacttttgtggggttacgaagatcccctgctgaaactagccaaggatgttgttccaaaagaacaaaaattaccgtatgaagaatttggccttatgtacggtaaaaatagtacatcaaaggacagagtaactatttggtcaggcgtcgacgacattactaagtatggtataatcgacaaatacaatggcaggtctcatcaaacccattggctctccgaacaatgcaaccgtctcaacggtactgatgggtctattttcccaccccacataacgaaaaacacgacattgcatgtatacgaaaaagatctttgccgtctattaccactatcctttgagaaagaggtgactgtaagaaatggcgtacagggataccgcttcagccccgcacctgatgtattcgcttcagtagatattaacaaggacaacatgtgctactgtcctgcaggaccaccttgtgcaccgaatggaatgttcaatgtttcactttgtcaatacgattcacctattttgcttagtttccctcatttttatctggccgaccagtctttgcgaaacgctgtcgagggaatatcaccaccagagaaggagaaacatcaactgttcatcgatgtgcaaccggaaatgggtacagcgctgcgagcaagagcaagaattcaaataaatcttgccgttagtcaggtggttgacataaaacaggtggctaatttcccagacatcgtcttccccattctgtggttcgaagaaggcattgattcgctacctgatccaatactggatttaatgaaggtggctacgaccgtcccaccaaaagccaaatttgttcttacaatagcattatttgccattggaggctttctgttcgtgatagcagtgttttgccttgtacgaaaatcacaccggcagagcacgcttcatctagaaggttcaaactatctagcgacagcatcaatagatcaagccaaaaagaaagctaaacttgaaaatggaagtcacaccaattga

SEQ ID NO: 450 - DNA, 462 bp, Aedes aegypti
atgccggctaaagcagtttgtgttctgagcggcgatgtcaagggcaccatctttttccagcaaaatggagattcggatccggtgaaggttactggcgaagtgaccggactgaagccgggcaaccatggattccacatccacgagttcggtgacaacaccaacggatgcacctcggctggaccgcacttcaacccgcacggcaaggagcacggtggccccgatgccgccgaaagacacgccggagacttgggcaacgttgtcgccgatggcagcggagtcgccaaggtcgatatctccgacagccagatttccttgtccggaccgctgagcatcctgggacgcactgtggtcgttcatgccgatcctgatgatttgggcctgggtggacacgaattgagcaagtctaccgggaacgccggtgctcgtcttgcttgcggtgtcattgggatttgcaaagcataa

SEQ ID NO: 451 - DNA, 1149 bp, Aedes aegypti
atgtatccatcaaaaggaggagcgtcgtcagctggaggtttcacgcacctttccctttcagagggtcaaaataagcaggacaaattttccaccgacagcggagcgatagactcgggcttccattccgggcagaacttcagctcggacaatctgttcagctcgtcttcgtcggcgtcagtgcaaccggaagaagctccggtgcaagcgctgtaccaatccggtagccagaaacaacccctggaggaagacagccgcaccttcgattccggtgtggatctagactcgagtcaacagaacccgagcagcgccgatccgatgaaggtggacgacctgtgcatcagcctgcgccaaatgcagatgaagtccaaggagcaacaacaggcgctgcatttgatgaaatgggaaaagtacttccaccagaacgacgacggtgatacttacctacaccttgccgtgatccacgaggctaccgaagcggtctataatttgattcacgcggcaccgcggccctggctggacattcaaaatgacattggccagacgccgctgcacctttcggtgctgacgggccagccgaaaatcgttcgccggctgatggtggccggtgccaagaccggaatccgtgacgtcgaaggcaacacaccgctgcacctggcctgcctacaccagaggactgactgcgcaaaagaactcctgaacccgctgagtcaagatctggaacagtggaactacaatggaaaacgatgtgttcacattgctgccgagacgtccaacattgaaattcttcggtctttggtcagcgctggagccgatatcaactcccgggaaggaaaatccggccagacaccgctccacattgccatcgagtacaacaacgaacagttggtgaacttcctgctggacgagtgccccaagctgcgactcgagcaggtgacctatgccggcctgaccgcctaccagctggccgccatccaacacaaccagaccctactaaccgggctgaaaagccacggtgcggaacccctgacaccccccgagagcgactacgaggaagaggacagcgaagaagacgaacagatgtcatcgtattacggatccaatgcatttggtgccactttccctggcctttccaccatcaatgttgcgtga

SEQ ID NO: 452 - DNA, 1992 bp, Aedes aegypti
atgcgtaggaatgccgacaaagaatttctggtgaagcagaaattcttcttcgaagtgttccgcaatatccatctgcctctcatgttcgaggagtacatgccatacaccaagacatgggttttcgatgaaactaagtacacgaactacaaggaagtcgtcgagttcttcgactactacaagcttggattcctgccgaagggtgagatgttcaccatctacaacaaggagtacatgaagcagacttatctgttgttcaactttttctacaatgctgccgactgggaaactttctacaagaacgttatttgggctcgcgagaacgtcaacgagggcatgttcatctatgcagtgacaatggcgaccttccaccgtccagacctcaagggcattgtattgccagccatctacgaaatctatccctactatttcttcaacaccgacatgatccacaaggcaatgtacaagacgatgtatgagcccaaattcggatttgctagcaacggtaaatacaacgtagtctactccaacttcaccgctgtgtatccgatggactatttcggcgaagataagctgagctactttgaagactttggtctgaacgcttactactactacttcatgctggactatccattcttcgtcggagacagcaaattcaacctgttcaaggatcgccgtggagagttgtacttgtacatgtaccagcagctcattgcccgttactatctggaacgtcaagccaatttcatgggaccgatcgaagagtttagctgggatcaaccaatcaagaccggatacacaccaaagatcagctactggaatggaatgcctttctatggacgcaacgactattactctctccccaaggatcaatactacaagattgacctgctcaaggactacgaagcaagaatcagacaagttatcgaccagggatacctgtatctagatgatggaaccaagattgacttccgccagcccgaatccattgactaccttggaaatctgattaacgccaacccagacagctacgatacagattactacaagtacattgaattcttcgctcgtctcatgtacagtggctctgactatttctacagcggatcgaaggtctggccaagcgctttgatgcacttcgagacatccatgcgtgatccattcttctatcagctgtactacagaattctgagctactactggcagttcaagagctacttgccatactacaccttcgatcaacttaacttcaagggattcgagatcaagaatgtcgttttcgacaaactgatgacctacttcgagtatttcgatgccgatatcagcaacgccattccatttggcttctcgtcggacaagttcttcgatttctctgtcttcgctcgccagaaacgcatcaaccacaagccattcacctacaccatggatgtcttctctgagttcgccggcaagggtgtcgttcgcatgtacatgggtcctaaattctacgacttcaagcagctgcaatacctgaagaaatacttcgtcgaagttgatcagtacgtgtatgactttgtggttggcaagaacaccgtcgtccgtaactcgcgtgattacttctggagcattcgtgatcgcacctcatacagtgatctgtataagaagatcatgatggcgtacaagggagaagacaagtttgtcctggatatgtcggaagctcactgcggattccccgatcgtctgctgctgccgaagggtcttccgagcggtttcgaaatgactttctacttcatcgtcaccccgtactacgctcccaaggtcgagcagttctccacctatgaatacacctacagctgcggagtcggttcgggctcgaagtatgtggatgacctgccgttcggattccccttcgatcgcgagatcaacttcgcctacttcttcaccaagaacatgtacttcaaggatgtgctggtctatcacatcgacgacatgaaactgaaccaatcgttctaa

SEQ ID NO: 453 - DNA, 4131 bp, Aedes aegypti
atgctgatcgagcgtgtccagagtcaagggtcagtcaaagtgtttatagatggctcatctgtagcggctttccgtaggggattccctgcattgcgaaaatccccgaccttttcagtgattggaccgaaaactatacggccatacagtacctattcagtggctttcagcaattctgtcaataaaaatgttcacttaaatgtaatcctcgaggatcaaaataacccctcagaatttagtcttaaaaaactcgcagtcgttaacagaagaacagtcaaaaaaattgattttgatataggaaatatcaccagcagtgaatatcagttgcttgttcaaagtgcagatcgcacatttagctttgaccagagggtagagcttctatatgaaccaaaaactatgtcggtattcatacaaacggacaaaccggtgtacaccccgggagatctgctacgttttcgggtaatcgtggtggatgctgacactagacctgtgactagtattaaaacggtaaatatagcgatcgacgattctgcagaaaattccattcgaaagtggccttatgccaagttgttaaacggcgtctttgagtcacaagttcaattagcttcttcgcctgttcttggcacctggagtatcaccgtaaaagcttccgacgacatcattgtcaccaaacagatagaagttaaggaatatgtgttgccaaaatttttcgtgaaagtttacccttcggaggttctattagtacaaaatgagaaggtttctcttaccttggaggcctattacacgttcaaagaacccgttgacggcaattacaaagttgagttgttcttggaccataccaagagaaagcctgacttcataaaaagtgatcgaatcaccggtaaaacttcacttgagtttcaattgaaaaatgaagtagacattgatggcgacgagcagtacactgatgtcacggttaaagttgaagttgtcgagacattttctaatcgcacagttagtataactgagaaaattccaatttatcgtcagccttatgccgtgacccttcttccatctgcaccatcatttcgaccaggagttccatttgatgtaaaaatatttgtgaaagatcagcttggacaccctcctcccgaagaaaatacggcgtcaattgaccttactgtagagtttcatttgcctacagacagtgacaccaaatctttaactgtggatctggacgagaaaggaacaggtcagttcatattattgccccatccaaacgcccaggagctgaaagtgacggctacatatgactctcaagaatacgaagtaattcacgatccgatacatggtttcagttcgcaaagtaagcagtacatcaaagtaactctgaatccaaaatactataacaacattaaagtcgataaggacatcgtactggacatctcctgcactgaaacaatgacgcacttctcgtacatcgttgtcaccaaaggaaacatagtggaggcatcgaacgttcctgtcgcgaaaaaaaagaaacattctctgaggttgaaaatgacttcaaaaatgtctccggagtcgaggcttctagtgtactatacaaacagggagtatctcatctttgatgatatagagctgaagttcgattcgttcaacaacgacttcaaattcgatttgaacgatgatgagtattttccagggcaatcagtttatatcgatgtatacgcttcaaaggattcatacgttgcgttcagtggaatcgatgaaagtgtactcctggtaggcaaagaacgccatgacttcaacaaaggagatgtgctcaaggaactcgctctttacggagcaacaaatgatgccgagtttgacttgttccacaaatatggattgttcctgaaatctactgctaccgttgatactcctgtaactcgctcacagaatgcacgatttggtactctactaggcaggacgaagcaagcgattgaaattcgaactcaattcctagaatcctggttatggaaatccttttccatggatggtcgaaacaacttcaaagcaatagaagactcggttccggatactattacaacgtatcacgtgtcaggatttgctttaagtccaacactaggtcttggagtaatccaacaaccagtgagtttcaccgttcgtaaaaaattctacttggttgcaaatttgccttactcgatcaaacggggtgaagtggcgttgattcaggttaccgttttcaacttcctaggaagcagcgtcacaaccgatgtgacgctgttcaataaacgtgatgaaattgagtttgtcgagaaagcatccactaataatacacatcgaacaaaggcggtaattgccccgaacaacaatgggaaacctgtatcatttatggtgaaagcgaagaaattagggcagattgcgatcaaattccaggcggaaaacttgctggaaacggatgcattagagcacatgttacgagtaaccccagagagccatcgctatgagaaaaatgtagctcgattcattcaactaccaacgcattcaaaagtacctttcgatgtgaagctggatattccgaaaaatatcgacgagggttctgctcaaatcaaattcactttagatccggacattttgggaacgaccattagcaacctggacgggttgatccggaaaccatctggatgcggcgaacaaaatatgctccattttgtgccaaatatagtcgttttggattatcttaacgaaaccaacacagcggcagaagatgtgaggaccaaagcaataaattttcttagcagcggatatcaaaaccagctacgctacaaacgttcggatggggccttcagtgtctggggacaatcgcatgctggcagtacatttttgacggcttttgtggcgaaatcattcaaaatagcagccaaatacatacaggtggataagtctatagtagacgcggcattcgactggttagcgaaacaacaacaatcagatggacggttcccagaagtggggcaagtaatccatgcagatatgcagggtggacttcgtaataacggttttgcgctcaccgcgtatgttctgatcgcttttgctgaaaatgaggaagtatacagaaaataccgatcacagctgattaaaactactagctatatagcaaataatcttgataatatggagaatccatacgacctctcgctgtctacttatgcgttgatgctagcaaatcatggcaagcgcaccgagtttcttgataaactggtcgaaatttcaatatttgacagcaatcaaacagagagatattgggacagcaaaccagttgatattgaagttgctggatatgctctattgtcatacgtagctgccggtgacttattgcatgctacgcctatcatgcggtggctcaacaagcagcgttatggtctcggaggctttcctggaactcaggacacattcgttggattgaaagcattggcaacgttcgctgcgaaggtatctagtgggagaaacgactatcgtgtaacgataattcacgaaccaaatcgtcgacgtacattcgacgtagacaggcacaatgcgtttaatattcaagagcttgatattcctaataacatcagaaaaatgcgggtggaagtcgtaggcatcggcaacggctacttccaagtggcatatcagtactatcaaaatattcaggtggctaagcccagtttcagtcttacaattgatcaactcaacaccacgacggaacacatgcagcaattggacgtgtgtgtgaaatacataccaaaagaggcttatcaaaaatcgaatatggctttggtggaaatattcttgcctagtgggcttgtagcagactcagatgccattacggacaagactggaggaattcgaagaattgaaagacgtttttcggacacctcagtagttatatattatgataatttgggccccgaagacgagtgcttccgagtgactgcttatcgtcggtataaaattgcattgcacttgccatcatatattatagtttatgattattataattctgagcgctttgccattcaacagtacgagggaaaggtgctgcagctctgcgatatttgcgaagatgaagactgcgaaactttatcatgtgaaaatagctcgaaatag

SEQ ID NO: 454 - DNA, 2135 bp, Aedes aegypti
gaaactttttacttacatttaatttatatttctcgcggaagaccatataaataattgatcaaacacagtcataacatctatgtttgcgaagaatttccgagttcaagggttatcactaagtggatgcagaaagctcgtttatttcaaggggataccccttgaatagacgatggtttaaacattgccttccttatcaaaccaatttcccattcttctttgcctgatatttttatcattttgtgtttacgaaaatgggaacgactcttgaactaggccatcgtccataactgtttttgcatcttttattttaaaatgtgaatatttcagagaaaatatacctacgttaattacgaagagcaacactgaggaaggctgcaagtaatcgaaattcacgtatctgctttaaagtgcttattttgcatcaatcgccctaaagtaataaatagattttgaaataaaattttcttacaatatcttttcaccttcgaaaaaattcctgaatttttaaacatatcagattaattttctgattaccataatttgtccttaaaaagaagcataacctagtgactggagttcttccatttgtctaccaattagagaagttttcatcgctattcttcattctcacgaaaagtaaaataccaaggcgtctcgcggtgcttcacgattgtttagttcattcaagttcaatatgcgacgaagactcacgcttgtcctgcttgtacttctgagtgtacaattttcttattcggatggtctgcaagatagaataaaatgcaatggagtatgtgtgccgctgaaccagtgtaaaactgacgtaggatcattcagcactgtggatattagtgacgatgtcgaggtaacgtgtcatcactatcttgaagtgtgttgttccaaggaaaatgttgtaaacggttcggcaaataaatgtgaaaatagtgccatcaaaactttccgagactgtggcagaagaaacgaagatggaatcggattcagaattacacacgccaagcataatgaaaccgaattcggagaatttccttgggtggtagcagtaatgcaagtggaggaatctcagatggaacttgttaaacccgattccaaattgatatgtggaggttctctgattgctccaaacgtggttctgaccgctgctcattgtgtgatgaatcgttcggcagaaacattgataattcgagctggtgaatgggacattgctactcggaacgaagtgatcccgtatcaggaacaacgagtcgagagaatagttctgcatcctaatttcaaccgggagcttctgtttttcaatttggcgctgctcatcttggaagacaatttcgtagccgacgaacatattcagctcatatgcatgccaccacaaaacaaagctttttacgatgaaaattgcttcacaaccggttggggcaaagtggattttagtgcaccaagctaccaaacgatactgaagaaaatcgaagttccaatagttcctaggcaaaaatgcgaaacacttttgagaggtacccatcttggtgcatcgttccgactgcacgattcgtatatttgcgccgggggattggaaggaatcgatacctgcaccggagatggaggatccccgttgatgtgcccaattccagggttcaaaaataagttttaccaagctggaattgttgcgtggggaatcggttgtgcgcagaaagatatacccggcgtctacgtaagagttagtttgtacacggattggatcaaggaagaaataaaaaagatcgagtaggtgagggactaacacttataataataagaaaccctaataattgaagattgatcaaagcttaagccagtaacaacgaaaagcattaatagataaataaaatgaatggggttttcaaacataaaaaaaactaaaaaccaagattcttgaatcgcgaataaaaataaatagctatccgaaacaagctaaaaatttcaaacgtgtgctacacgaaagtccgtttttcatcaccaagtgttcgttttctatcgtaaaactcgtcgcttgaaaactccatgtgcttacagttccttcccgatcatagtccttgtttcgtgcccgtagcagactaccagtcctgtgggcgttttgtaggtaccgt

SEQ ID NO: 455 - DNA, 1441 bp, Aedes aegypti; identical to SEQ ID NO: 200

SEQ ID NO: 456 - DNA, 1522 bp, Aedes aegypti; identical to SEQ ID NO: 199

SEQ ID NO: 457 - DNA, 1149 bp, Aedes aegypti
atgaaactcttgtcgttttttgttatactatcaattactaatggattcaacatcggagcaaccactcccagtgaagcatcgatacagttttcgttgagcttctttcgtgcagcctacaatctgaacccaaaccgaaactgtgtcctatcgccgattgccattcagcatacgcttgctatgttgcatcatgctgccaagcggaaggaatccagccaaatgcatcgcctgcttagaattccagagtcaagtgactcatacttcgagagaaatgaaccattttcaaatgacctgaataacgatgcgctagagatgatcaccaaggtgtttcactcgcaggttgaactcaatcccaatcttttgccggtgctacaggccgagtactccgttgacgttcaggtatccgacttcagtcgtccggaacaggtggtggattctgtgaatagatgggcctctcgcttcaccaacggattggtgggagatgttttcaacggaaatgggttttccgacgatgccaacttgatgatcatcaacaccctcacgtttaatgcttcctgggagcatccattctcccctcgaagcttgctgaaagacgatttttactttctgaatggagtaagaaaagttgacacgatgcgaagttacaagggttttagatactgcgagatcgacgatattcgggcagtagagctggcctacgaaagaaactctgacctgtccatgctgatcatcaaatctgactcacaaccgttggacacagtcattgagaggttcgatatggaaatgtatcagacgatcaacgagcgtctgtatcatgatcgattcaagttggttatcccgaagttcacgattagtacggggatcggggcgaagcgcattctgaaagctatgggcttgagtgatgtttttggcaaagatacgttcgatgtgttcgttggattcagcagtcgtttggcaaacatctatcaagcggtgcggatcgatatcgacgagaatgggacacgtgccgcagctggaacctactcagagaaatcgatgcgggtagggacggatttcaagtacgccattgatggaccatttatgtttgtgattcgcaaggatacgaccaaagacattgtgtttatagggcattattcaagttatgtagaataa

SEQ ID NO: 458 - DNA, 1470 bp, Aedes aegypti
atgatgagcaatcgaacaatagcaatggcagcagcctgtcttctgacggtgctttttgctgtcacatcaacccaagcacaacatgactcggagcagcagcaacaacagcaactggagcaatacgactcaaacacatcgccacaacacaacaacggagaacacatttccggtcaccggttcaaacggatgtacgccatgtgcccgccggaattctcccgcatcggcaacgagtgctactacatttctcgggacaaacaaaactatctggatgcgcactttgagtgcaaagttcgcaacagcaagctggccgaaccgatgaagtacgacgacaaaagcctacggaagtatctactgaaactgaaggagaagaactatatttggattggcggcaattacaactggaaagcgaacaagtggcagtggggttacagcggaaaggacatcggctatcagtccttcagtcagatgattccagggagcagccaggatctgagattccactgtgcagtgcttaaccctgacctcaaatacagatggtcagccaagctatgcacagaaaagttaaatttcatctgccagcacaagatgccgctcgttagcagcctcagccgcgccaaggtctacacccggtggaacgaaaccttcccgaacgagttggccaacgaggtggaagtggtcgtggccgatcaaccgcgcatcggtaacctgaaggacagggactactacagaactcaggacagccctaagctaaatctaaccaggttgaacaggaattggaaaaagatcaaccgaactcatcgtatcaaaagtttccgcaatcgcaaccgtgctcaggctagaaatgaatatattagcaatgatatcatccgtcgtccagtcgtagaatacgcttcggataattcgtacaactccatcaacggtaacggtaatggcaatggaaacggatatcgcaacggaaacggcgcattcaatcgcggtttcaacgtggacattcatcgtcagaagccccataaagatcgcatgtcgaacgaagtaaacggtgaattcagacatcatcgtcatcgtcgtccgtcgacagaagctactcctacgacatctacaaccagtactacaactaccacgaccacttcggcaccggaaactcttccaacggaagctctacaggtagtcaccgaaaaccatcgactcccgaaggcagataggaagtctcgtcgcgatcaaatccgagagcggctatcacgactcacacccgaagaacgagagcaattctacacgaaacgtgcttcgaccaccgaaaaatatctcaacaaagcccaactgttgtcgcacgaagagaagaaggctcgtcggaacaatctccgggaacgactagcacgattgacgcccgaagaacgtgaaatgtacttcaccgagcgtgccaaacgaaaacagtccaagaagctgcggaccacaaacgaaaccattccgtaa

SEQ ID NO: 459 - DNA, 870 bp, Aedes aegypti
atggacaccgcggatgagctagacgttctcggttttgggaacaaaactaatgagtcatcaacatcaaacgagaatcgtcccctttctcgacctacttgcgatgagtattatgatatgtcaaacaagcgacgtggcatagcattggtgttttgccacatgaacttcgcggtcatggccaaaaggaacggcactgataaggatcgcgatgacatctgtagtacgctttctgggttagatttcgatgtacgtgtgttcaacgacctgagaagaaaagagctactgcggacactgaaaaacgtatcccgcgaggatcactcggagaacgactgtcttgtggtagttgtgatgtctcacggcgatcagggcgtcctctatgccagtgacaagaaatactacgtggactcgttgtgggagaagtttaccggaaatgcgtgtccttcgttgataggaaagccgaaactgttcttcgttcaggcttctcgtgaaaggcagcctggaaaaaagggagaaggaggaagagaagaagaatcacaagcatccgtagatgtagttgactcgcccaacgattcttcggccctgtattttatcccaaccatggctgattttctagtcatgtactccacatacgatggatattattccgggaaagacccactgcagagatcatgcctcattcaatctctctgtatggaactggatgaaaatggacgagaaagggatttgcttgcactgcttaccggagtttctaggagagctttatacacatgtgaatcatctgttccgcataatgagaaggataatgcactaaaaccaattccttgcgtcgtctcaatgctcacgaaaactttctttttcactaagaaaacctaa

SEQ ID NO: 460 - DNA, 321 bp, Aedes aegypti
atgaagtccataaccacactgtgcttagctgtggtttgctttatcgcccttctttcagtgggggccgcggcgccacaagagagtgtttccattcaggacgctgagcatcccgcagaatttgacaccgatatccaaaaggttcagcatgatcaagccagacaaattccggtggaatttcaacgtcgaaagcgcatctcatgtgatctattgagtggtcttggatggggtcacagtatctgtgcgggacactgtctagccataagctggcgctaccgtggaggatactgcaatgatcaaggagtctgcgtctgccgcacatga

SEQ ID NO: 461 - DNA, 2373 bp, Aedes aegypti
atggcgaagaaagtattgctgctgagcctctactcggcggtgttgtctacgtggttcgggttcggatatgtgcagtgtaaactacccacttcaaggtctgaaattcccaattttgattatacggttgctcaacagccagatcaaagcgacgcatgcgaacaaaatgaagtctgtatggtgtcagtcgagtgcattttggacgccaaaaagaaagccatcttgaagccatgttcaactgtgcccagcgtcgatggagtttgctgcccgtccagcgagtataatggaactagtagccgtgttcagcaaaactctgaagaacatgccgctgatcacttggtactgcaagctattcacgaaggtcgtcgcgagtacgacgagaagcttcgatttgaagatgaacaccgcgcggtaatgactgccaaggagaaaccagaagccatgttccaccgtatgtttcttcccggcggtttgaagacccatggtaaggaagttgtcgatgcggaagagcaagccaatgtttacgggcatgttttcgccagccgaaaatacgccgagttgaccaatatgaccttgaaacagcggcaaggtgataggtttgcgagaattccccgggcaattcggaaacgctgtttgccaccagtaccttgcaacccacactcccgctaccggaccatcgatggttcatgcaacaacccgttgccggaccgcactagttggggtatggagggttatccttttgaccgggttttggagccagcgtatgaagatggcgtgtgggcaccaagaatccattcggtgaccggaaacttgctgcccagtgcccgagtaatctccgtagctcttttcccagatgagtacagaccggatccgcgcttgaacatcttgttcatgcagatggggcagttcatatcgcatgacttcactcttagtcgtggttttacaacgaagcacgggcaagccatcgaatgctgtactccaaattgtacggcaccgctttttggtccgcatcggcattttgcgtgcttcccaattgaagttcctccaaatgatccgttctactcccgcttcggagtccgctgtttgaacctggtccgcattcggctagcgcaaggccctgaatgtcaactaggatatgccaagcaagccgacctggtgacccacttcctcgatgcgtcaactgtttacggttcgactaatgatgtagcagcagaacttcgagcatttcagcagggtagactaaaggactcgtttccgaatggtatagagctgcttccattcgcgagaaatcgtacagcttgtgttccttgggcacgggtatgctacgaaggtggcgacatccggacgaaccagttgcttggcttaaccatggtgcacacgttgttcatgagggaacacaaccgactagctgtgggcttgagtaagatcaaccctcactgggacgatgaacggctataccaagaggcgcgtaggattcttatagcagaataccagaatgttgtgtacaatgagttcttgccgatcttgcttggtcatgagagggtacagcaattaggattagccgatccatttgatacgtacacaaattactatgatccaaatcttcgtccgatgacgcttgctgaggttggggctgctgcccatagatacggacattctctggtggaaggtttcttcaggttccttacccgggaatccccaccggaggacgtattcatcaaggatatcttcaacgatccctccaaaaccctcgagccgaacagcttcgacgtcatgatgttctcgttcaatcagcagccgatggaacaaatggatcgtttcctcacttacggtctaacacggttcctcttcaaggagcgtaaaccattcggatcggatctggcatctctcaacattcaacgaggtcgggactttgccgttcgaccatacaacgactaccgcgaatgggccggattaggtcgaattaccgactttaaccagttaggtgaagtgggtgcactcttggcacaggtttatgagtctcctgacgatgtggatctgtggcccggaggtgtgctggaacctccagcggaaggtgccgtagtgggttcaacatttgttgctctgttgtccgctggctacactcgttacaagcgtgccgatcgatactatttcaccaacggtcctgaggtaaatccgggggccttcactttgcaacaactcggcgagataagacgtacaacgctggccggcataatctgcgccaatgcggatcataaggaagatttctaccaggcccaggaagctttaaggcagtccagcgcagataatgttcccgttccttgcacccgctatgacaccgtgaacttaggtctgtggcgagaggaaggtttttaa

SEQ ID NO: 462 - DNA, 2163 bp, Aedes aegypti
gatacttgcgctaaaaatcaagtgtgtgttgccgacgtgaaatgcaaggctgatcttctcgaattgacgccatgttcgactgcagacaatacgatcggcatttgctgttcaacaaacgatccaagcgacaaactgtgggccagcgctgtggaagatggccgccgtgaattcgaggaaaaactcggccatgttgaaaaacaccgacacgaaatgaccgccaaagagaagccggcgtcggtctttcataaactgtttaaaccggagggccttgaaaaagatgcaaccaaaaccgatccaaaggagcgagccgatgtgtatggaagtgtttttgcaagccgaaaatacgccgaaatggccaatttgacgaaagaggaacgtcaagggggccgttttgcacgacatctcgtagcgaggtggccacgacagattgagctcggtctagcgctgtgtgatcccaattctcggtaccgaacctacgatggaacgtgcaataatccgatgccggagcgcgccagttggggatgtgccgagtatccatttgaaaaacttttagcgcctgcctacgaagatggagtgtgggctccgagatcccactcaataaccggtaacctgttgcccagcgctcgcgtcgtttccgccatcttgttcccggatgttgaccgacaggatccgcacttgaactacctcttcatgcaaatgggtcaggtcataacgcacgacatcgctcaaagccagggcgtaacgcttgacaacgctaaggaaatcgactgctgcaccaaggaccgatcgcgagccctctccggagaaaagctacactttggctgtttgccaatcgagatcagtcctaacgatccgttctattcccagttcggagtcagttgcatgaattttgtacgcatcaaactttcatgtggcaccgcatgtctcggttatggcactcaagcgaactctgtaacgcacttcatcgatgcatcgttggtatacggaaacagtgaagctgtggcagcttccctgcggacattccagcaaggtaaactacgatcttcccactcagctggaattgagctgcttccgttgagtcgtaaggcaacagactgcgtaccatgggctcgggtatgcttcgaaacgggagacttccgggtgaatcagctgctagcggtaactcagtttcaaacgatgttcctcagagaacacaaccgccttgcagttggactaagtcacatcaacctccactgggatgacgaaaggcttttccaggaagccagaagagttctaatcgccgtacttcagaacattgtgttcaacgaatatcttcccattctacttggcagcgagaaagctatgcagtttggtttgactgatcccttggaaggttatggctattcgtacagcccggatgtaccaccgataaccctggcggagagtgctgttgcagcgttccggtttgggcattccaccgtcgatggattcttcagactactgcgacatggcacagcagcggaagccgtccccataaaagatctctacttcgatccctcaaaaattcaagaaccgcatagtttcgatagtatgatgtactcttttggccaacaatcgcagcagctggcagacaactccatgtcagctggtctaacccaccacctgttccagagagaaaatccgttcggtttggacttggccgcactcaacattcaacggggccgtgacttcggtttacgtccatacaatgactatcgtgaattggctgggctgcctcggatcaccgatttctacgaactgggtgagatgggctcattgctggcacaggtttacgaatcccccgaggacatagacttatgggtaggcggactccacgaaatgccctcctatggggcggtagttggaccaacctttgcccatctgttagcggaaatgttctaccggcttaagcttggagatcggtactacttcgccaacggaccggaagtgaatccgggagcttttaccctgcgacaactgcgtgaaatacgggcaaccactctggcgggactgatctgtgcaaatgtggataaccggtacgatttctaccaaaccccgaacgcattctttaaggccagttgggaaaatgagccgatgccatgtgtcaactatcggctcttggatctggaagcctggcgggaatga

SEQ ID NO: 463 - DNA, 2367 bp, Aedes aegypti
atggcgagggaagttttgctgctgagtctctacttggcggttttgtgtacgtgggtaaatttcggtaatgttcagtgtaagctatcctttgcgagatctgaaattcccaatttgaactacacggtcgttcaacatccggaagaagacgatgggtgcgaacaaaatgaggtctgtatggtgtcagtcgagtgcaccttggacgccgaagtaaaagccaatttgaagccatgttcgacggtccccagcgtcgatggcatttgctgcccgtccagcaaactcaacgaaactagcagccatcaccagaaacgctccattcaacatgccaccgatcgcttgatacaaaatgccattcacgaaggtcgtcgagagtacgacgagaagcttcgccttgaagatgaacatcgcgagcttatgactgccaaggagaaaccggaagacatgttccaccgtatgcttctccccggcggtttgaagaccaaacacgtcctcgatccgcaagaggaagctgatgtttacggacacgttttcgccagccgcaaatacgccgactcgaccaatatgaccttggaggaccgccaacgtgaccggtttccgagggtacctagggcaatacaaaagcgatgtctgcctcccgtaccgtgcaatcctcatcgtcgctacagaactatcaacggatcatgcaacaacccgttgccggaccgcaccagctggggtatggcgggttatccgtttgaccgagttctgtatccagcttacgaagatggcgtgtgggctccaagaattcattcagtgaccggaaacctgctgcccagtgctcgagtgatctccgtagcacttttcccggatgcgtatagaccggatccaagattgaacatcttgttcatgcaaatgggccagttcgtatcccatgacttcactcttagccgtagttttacaacgaaacatggtcgtcccatcgagtgctgcacacataattgcacggcacctctgtttggatcgcatcgacactttgcgtgcttcccaatcgaagttcctccaaacgatccgttctactcccggttcggagtccgctgtttgaacttggtccgcattcggctagctcatggacccaaatgtcatctggggtatgccaagcaagccgacctggtgactcatttcctcgatgcgtccactgtctatggttcgactgatgatgtagctgcagaacttcgagctttccatcagggtagactacgtgactcgttcccgaatggaattgaattgcttccattcacaagacatcgtgaaaggtgtgttccatgggctcgggtatgctacgaagctggcgacatccgggtaaaccagctacttgccctgactatggtgcatacgttgtttatgagggaacacaaccgactagcatctggcttaagccaggtgaacccccactgggacgatgaacggctgtaccaagaagcgcgtagaatcctcattgccgaataccagaacgttatcttcaacgagttcttaccaatcttgcttggtcgcgagagggtacagcaattgggcttggtcgatccatttgatacgtacaccaactactacgacccgaatctacgcccgatgacgtttgctgaagttgcagcagcagctcaccggtacggacattctctggtggaaggtttcttcagattgcttttccgcgacgaaccaccgaaggacgtattcatcaaggatatcttcaacgacccctcactgaccctcattccgaacagctttgacatcatgatgttctcgttcggtcagcagccaatggaacaaatggatcattttatcacaactggtcttacgagattcctcttcaaggagcgcaaaccgtttggatcggatctggcatctatcaatatccagcgaggtcgtgactttgccctgcgaccatacaacgattaccgcgaatgggccggactgggtcggataaccgattttagccagttaggtgaaatgggtgctcttctggcgcgagtttatgagtctcccgacgatgttgatctatggccaggtggtgtgctggaatctccaacggatggtgccgtcataggaccaacattcgccgcgctgttaaccgccggatacactcgttacaagcatgccgatcggtactatttcaccaacggtcccgaggtaaatccgggtgccttcactttgcaacaactgggcgagataaggcgtacaacgctggccgctataatctgcgcaaacgtggacaataaggaagacttttaccaagccccggaagcttttatgcaatccagcaaggacaatgttcccgttccttgcaccaattatcgcacagtgaatctgggtctgtggcgagaggaaggattttaa

SEQ ID NO: 464 - DNA, 1113 bp, Aedes aegypti
atgagattactggagagtggctgccttctgctgttgatcgtgacgatagcggtggatggccagcaaacttgtaccggaccggacggaagagccgggaactgtatactgctgcgatcgtgtgatagcttgttcacgttgatcaaaaagaagcctctcctcccggaggatcgttccttcctgagccggagtcagtgcggatggtctcagcaggagaatcatccgttggtgtgctgcagtgatcctctggacactccaatccgtgttggcgagtccttgctacctccggtgggagtatgcggtattcagactagcgatcgtatcgtcggaggcgtcaacaccaagatcgacgagtttccctggttggcgttgcttaagtatgccaaacctaacaacgtattcggattccactgtggaggcgcgctcatcaacaatcgttacgttctaactgcgtcgcactgtgttaacggcaaggatatcccaactacttggactttagccgaagtccgcctgggagaatgggacacatcgtccgatcaggactgcgaaggcgttggagtggacgttgattgctcgccagacccgatcgacgtggtgatcgagcgccgtataccccatccggagtacaacccgcagacgttggaacagttcaacgatatcgctttgctgcgactggagcaacgagtagagtacaccgatttcatcaaaccgatctgtctgccccggacgcccgagttgaaggcccgggaaaccgtgggtcagaagttccaggttgccggatggggaaggacggccacggcacggtacagcagcgttaagcagaaggtcggcgtcgatgggatcggtctgcagaagtgtaactcggtgtaccagcaggagcgtgtgaccttgatcgagcgtcagctgtgcgccggagggcaagcgggtaaagattcctgtcagggcgattccggtggtccgctaatgggcgtggcgcagaacgcaaatgtccagttttggtatctggtgggattggtgtctttcggaccgacgccatgcggacaggaaggatggcccggcgtgtataccaatgtggcaaagtatgtggactggatcgaggcaacgttggagcagtga

SEQ ID NO: 465 - DNA, 1843 bp, Aedes aegypti
attcttcgttgatcgcgtgatcgtctacacggaaagaagttttggcgcgcgcgcagttttgccgttcggttggcaacttggagcacacatacacaataggctccggttgttggttttattatcgttcgggcggtgaagaagtgcaaccccgaagacaattgcactaataaatagtgaggttatcgaaagctggttgccgcggattgccccccccccctcggccagaatcacatacaaaatgacaaaattaatcactcaagcaacctcccggttgctcctgctggcagctattgccctattaccagcagccctcggtggatcaccatttatgcactctcgccctagaaccatcacacgaactgttagttccaacatcactctcgatgaaccgaccctcgcaaatccatacctggccccgggcggaaaggaagcccttggcacgaaacaagtgtcggattttagccttagccaaggcaagaacgtttttgatgtaatctaccagtggaagattatcgatttcttgtacccgagcctgcaggctcgcaacgatgccattcgtactaaacaattcatcccggagaacaacctcccgctgggcgttgatcgcttccgcaaccgcatcttcatcaccacccctcgctggaacccaggtgtaccggctaccctgtcctacctgccccttcccgttcaggacccaagtctacctctgatcccctacccagactggagtttccacacgtccccccaaaaccccgactgtagccgtctcgtttccgtgtaccgtatctacgtggacgaatgcgatcgcctttgggtcctcgacgccggagttatcgacaccctcaccaacctccaacagatctgcccgccaaagatcctggcgttcaaccttcacacagatgaacttctcttcagctatactctcccagcggatcaggtcaaacaggactcgctgcacaccaacatcgtggtcgacatccgagacgctcagtgtcaggatgctttcgcttacgttgccgatgtgtggcgctacggaatcaccgtgttcagcttgcgggaattcaagagctggcgcaccaccaactacctctacaacccgaatcccttcgccagtgactacaactacaaggagctgaacttccagtggtctgatggagtgttcggcatgtctctttcacctgtccataggaatggcgatcgcatgctgttctaccacccgatgtccagttacacggaattccaagtcccaacttcggtcctgcagaacgaaaccatctggcagaacttcggtctggccaaggcattccaaccggtgggcagtcgcggtaaggccggtcaatcgtccacctccggagtcgcccacaacaacgtgcagttcttcacccttgtgcagcagagtggagttggctgttgggatctggccaaaccgtacaaccgcaataacttaggtgtggtcgagaaggacatggacaagctgacgttcccgaatgatttgaaggtggatcgcgagccgaagcaatcgctttgggtgatcagcaacaagctgccggtgtttttgtactcgcgactggactacagcgaggtgaacttccgagtgctgaacgccggagtgcaggaagcgattaagaacaccgtgtgtgatccacggatgcctccgagcttggcctacgcaaaggagccggagtgcgatgtgtagagatttgatttgttttatgtgttttgatgtgtaagttttactactgttgataagaattatctagagcaaggtttaagttttgaatcagccgtgctgatatggtaatagtgaatccatgctcgaccagtgaaaataaatgattcaaag

SEQ ID NO: 466 - DNA, 1445 bp, Aedes aegypti
cttggagttcgaatccccctcctaattttccccttcatttgggaaccactgtccatttactgggaagttctacttgcaaagtacctgccaaacaagtggtaagcacaccgaggaaccagtacacacaccaagtgtgcctttggcggaaggtaattaaaattccgtttccctgtcctttgctctataaacagggggcgaggacgacgacgacagtcaactttaccgttcgatccgattcggacgaactttttattatttcgggggtgggtggtggataaaatttgcattcgaaagttcgaactcgggcagctaattggaagttacgtttagtcctgcttccggcggttatcctcaggaattagcgggatctctgtatctctccgggaggaaccatggagtacgtgttcgacatcttcttcgaggagtgcttcctgacgatggagcgcagcgggctgaaaagtcgcagcggtcggagggacgtgattgaccacctgaattcggtcatttccgggtgtattgagggtcgaccgacggccacggctcagttggcggtcgggttggccgttaaatcggctattgattaccaccggaagatgaaggacgacaattttagagtctgcatgatgggaaagtatcacaacgtgctgtatattgcgatgaggatcgcgtgggactggagcttggaggattcgcatgtgatccgattgctactggaggaaatctacgcgtgtgagaagactttcgagaggctatttttgggagcgttgtttggatcgaatgctccgcatttcattgccgggtggaagagcgatttcaaggatcaggatgaaaatctgagagcgatggtcttctttctgcaccatgccggtaaaacgagactgaaatttccaagttattcgtatatctatcgagatattgtgccaacgaaattcattgacattccaattgagtcctgtggtaaggccgcgcctcttcgcgttgccatacaggcttctgctccagatactctgatgattctgttgcgccaaggagcggatcccaatccggacgacggaggatcttccccgatcattagcctactggacaagctccgcgaatacgaaaaccgatcctatccgtaccagctggtgtcctgtctgaaactactgctccgttgcaccatcatggtcgagcttccctacaagccccaccttttccacgtccgaaaggagatgttccaaaccaagtaccgtctactcctcgaggataacctcatccctatagatcagctattcggagtgccaaccctcaaatccatctgccggtgccacgtacgtgatcagcttcggaacaacttccagctaccgcgcggtatcaatcgactcaatgtgccacgtaaaattatgaaatatatcgacttgttggattgattgcttttgctcactctcgtacttacttgtatgtcg

SEQ ID NO: 467 - DNA, 1344 bp, Aedes aegypti
atgatcgccggcgacaaccggcttcgaactgattggtatttgtatttacagtcagagttccactcgaagctggaattttgcgtaaaagccctgcgctcgtcgctcggaaatggttttcgtttgaatcgatgcaaagagatttgcatcgtagcatcatgcacatgtacggatgataatttcatcaacaatgatgatcagccatttcgaggacagcgtaatgtggaattcgactggaaactaactaagcaagtgttccaatctcaaaaagccaacgcagtgatatcgcctctctcggtgaaaattttgttggtgctactgtacgaagccaccggagatgctgccgaactttccgaaacacaaaccaaacgcgagttgcgaacagttctggaaccaaacggtgatctgaatgcaacccgcagcaagtatcgccaatggctggattcggcactgtcttcccacaaggactacgatttggaaattgccaccaagttctttgtcgaggaatacattgacgtaatttccaaatatcagatcatttcggatcattactacagcgccacggttgacaaagctcctttctcgaaaccgaaaatcgccgcggaacagatcaacagctgggtgaacaaaactacacatgggcgcattgcggagcttgtcaccgctgatggattggatggagcggtcatcacgttgatcaacgccatctacttcaagggactgtggacttatccattcccagagtatacaccaacactgacgttctatggcaatcagaaacaagtgcaggcaccgttcatggagcaaaacggtcaattctattatgatgattcggccgcattggattctcaactgttgcgattgtcatatcgcggaggaaagtttgccatgtatttcattctgccccaccaaggaaagactgtcgatgatgttctggataaaatgactctcagcacattgcatcaagcgctttggtacatggatgaaaccgaagtgaatgttaccattcccaagttcaaatttgacttttcagaagaattgaaccaaccactgaaggatattggaattcgtgaaattttctcccaaaatgcctccctgccattgttggcccgcggaaagggcgcccgaaatgaagttcgagtatcacgagtgttccaaaaggcaggaattaacatcaatcatctaggaagtgaagcatatgcggccactgaaatccaactggttaacaaattcggaggagatggaacgcaaattttcaatgccaaccggccattcttgttctttattgaagatgaagactttggaacgttgctgtttgctggcagagtggaagatccaacccaatga

SEQ ID NO: 468 - DNA, 1383 bp, Aedes aegypti
atgggtgtgttgggccagattccgttgctcataggggtgatcctgtttttgaggccggcccttgccaacgacaacctaagggtggcctatcaatggagccagattgactttgaattcccgtccgaggcggcacgatcaagtgccattgcctccggggattacattgcggaaaatgtgattccggtcggactggaagtgtacaagaggcgcctgtttctgacgctgccacgctggaaagctggaattcccgcctcgctcgcttacatcaacatcaacgaaaccagcagccaatcgcccaagctgcgaccctacccgagctggaatgcccacattcaaatggccgagggtgaagccccggaaatcgtttctcccttccggatacgatccgatcgctgtggacgtctctgggtgcttgacaccggcgtggcagaactccttggcgcagcaaaacccttggcgcctacgtcccttttggtgtacgatctgcacaacgacaacctgttgaggcgttacaagtttcccaaagatcacgtgaaggaggactccttctatgctaaccttgctgttgaagattcagactgcgatgatacctacgcttatgctgccgatcttggagcacctggtttggtcgtatattcctggaaatcgcaggaatcatggcgagttaaacatcacttcttctaccccgatccactgtccggaaactataccatcaccggaatatcgttccaatgggatgatggcctgtttggaatggcgctttcaagacctcagcccgatggatatgcaaccatgttcttccatcctttgagttcaacaaatgaattctcggtttctacgaaaatccttcgaaaccaaaccttggccacctcgggtaacatatataaggagtttaaggtgcttggatcgcgaggacccaacggtcaggctggagtcgcatttcttgatcaaaaaacgggagtcattttctacgccctgccgaatctgaatgccgtgacgtgttggaaaacttcaaaccgtgcttatacaatcaaatctcttggccgcgtgtacatgagcacaaccgatatggtgttccccaacgatgtcaaagtggatgacgagagcaatctgtgggtcctctcagatcgccttcatcaatacatgttctccagtcttgacccgaaggacgtcaacttccggatactgaccgcaaccgtgaaagatgccattgaaaacacagcctgtgatactaagatcaaacctcttccggatattatcaccaatttgggtgatatcctgcggccgtccacaacggctgcacctccgaaatccggagcacaagtgatgcttatctcccacatggcacttgtactcgcaattattgtcaagctaatactatga

SEQ ID NO: 469 - DNA, 4755 bp, Aedes aegypti
taagtacagcttaattattacgtctttggtttaatgatcttcaacagatatttgcgtttgcaaagctcgatttttacaacgcttgtttactttagaagtgttccgcatgctacagcattgagaaccactatcgttaaaccaaaacagcattatgcaacgtcggacgcacttacacaatcacaccttttccaacccgcaatcacccaccacccacttttccacatcctcctcttcccacacacgcaacaaaatccaatcaaaacaactccatctcacacgcacacaaccgcacactcatatcgataggcaaacgtcacccacacacgtttgctgttttcgtcgcagtgtgcgtaccatctcgcatcttccgttccggcagcagaagcatatcctttcccgtgccgagcgcaacccgactttaatccatcggcgacagtcgagcgagttggacgtgttttttctctattcaggtgtttccgaatctattgaaacagtttttgccctgcaaaagtattgtgctcagttcagtgtgatcatcatccgagaccgaaaatcgtgttttgacgcgcgtgtgtgaagaggaaggaagaaagaagtgccgaagcggtcttcttgtttttgtgcggtgcgtcttctcaccgaagaaccgagaataaagtgttcctctccttgttgcgcacccgcctgctgctgctgctgagcggggaagaagaagaaaggaaaggtgtgcgagcgagtgagtgagtgaggtgaaattacgcagtatttttcccgaaaaccagacggacgaacggaaaaaaaaactcgaatcggacaaagtttagaaagaacgaatcgctgtggttggattttatttgcggaagtttttcgagtgtgaaaagtgtggaaactccgtttcgggtgtcggaattcgccggttaagataaggaaagcgttttggagtgactttcgcgggaggattagttgacgaaagtgttttatgtctgtgtcagattgattgaaaacggagtgccggattaattggctgccggaggatcccttcccaggaacaataaccgacagggccggccgcctttgctgttctgcattcaaggccgggaggacattttgtttctgtgtgtgatcgggaagaagtaacttctgctgtgcgaaaaaaacaactcaacttgggtgatttaggcaacgtaagtgatcgtcgtcggaaacgggacccggtggattattcaatcgaccgactcgaccaaagaggacagaacagaagaatccgaaaatagcttgaaaagtgttgcgtttcgtgtggtggtagttttgggtgtcggaggaatcttcccggtaagaaggcgaaagtctaaagaagcagaagaagaagcaatggagatcgagaagcctctgaacggaaaccacgcgctcctgaatggtgtcccggagaaggccaacgggcaccatagcgaggactcgttgagtccggtcggaagtccgaagggggccgtcgctgtcgctggatcgccgggcagcgataacctcatgaagaagccgcttccgatcctggacgagcgactgaagaaacgggtccggaagttgtcccgttccaacagcaaggacggagtgctcggagtcgccggaacgcccaattttgttgccccacacagaaaatggaagaacagtcggcgatcgcgcaacggctatggccgtggactgccaaagaagggcggagccgggggcaagggggtttggggtaaacccggctcggaaatctaccaggaggtggacgaggacgaccagaacgatccgaacttcgacctggacgcgtacaacagtcaccacaatatcgaactcaaggaggtcgtcccggagatgacggacgaggagttccagaagaaggtcgaacccatcttcctggagtactacgaacacggcgatacccacgaggtggccgagagtctggacgacttcatcacgccggaacggcgaccgctgctggcgaagattgccgtcgagatggccttcgagcacaagcagtcccagcgggagatgacctcggtgctgctgtccgatctgtacggccgcaccgtcaccagcaaagatatttgcgccggattcgacatgctgctggtcaacatgccggacctgatcctggacaccccggaggcgccgcacatcctcggcaacttcattgcccgtgccgtcgcggacgattgcgtcccaccaaagtacgcttacgacatcgagcgggaggagctgtgcccgcaggctcgggaggccctcatccgggcctattcgctcctgtcgcaacaccagggctggggccacctggacgacgtctggggcgtcggcggggcgctccggcccgtccaaaccctgacccggcagatggccatcctgctgaaggagtacctgctgtcgcgtgatctcgaggaagcgcaccgctcgatcaaggagctcgaggtggtgcacttccaccacgagctgatttacgaggccatcgtaatgacgctggaagcgttgaacgagcaaaccgaggaggcgatctgcaccctcttcaagtcgctggacgaaacctgcatcgtcagcccggaacagatggagcaaggcttccgccgggtctacgaggacatgaccgacatcgtactggacattccgctcgcctactcgatcctggatcgattcgtgcagcgctgccagcgtgccgggttcctcagcgatgccctcatcaaggatttgccttcgagaggccgcaagcggttcgtctccgagggtgacggtggccgcatcaagccagtcaatctgcttgcccgtgacttttaagtgactaagcgcgctcctctagcgccatctgcattgagaggggagttgtggcccaaccgcgagcgtatctgagttgaatcgaagggacaaacgcggccgaaggctctccccctcccgaacaagaagtataacaagaaacaaggcagcaatgttctattttgtttgcgtatgggagcggagaacagtggacctctaccggagaaaaagagttgcaagtgttgaaaatgtcgatgaaggaagattgcctataatagcattgccgccgccaaaccaagtcaaaatcagagaaaaagagagaattgcaggtttgtcacaaaagtcaacctaatctactgttaatctacaaaacaattcacagcccgagcgcatcctacctatacatacttgtattttgatataaaaccggccacagaaaagaccgagtgagatttgaaacaaacaaaactcaaaccatctacctgtcgcgagagagaggaagagtgtcgtcggcttcaagaaattagatgtgcactctttctgctttcgtctagcagttaaggcatcatttaccatcaaagctactaaactacgggaaggaagtgtagaaaaggatcagccgaatcagcactgcaggaaacgaacgtaaagggggaagtggaagcaaaagaagaagaacgaggattggacataaaacaaaaggtagcagattcaagcaaaaagcaaggtaaatttatcataaaattaagcttacatttaaaactcatacaaaacaaacatataatatgcaaaaccatacaaaaaaaaactattcaaaccaacatataacaaaaaattaacgattaataggtgagataaagtgcacagttattcacttgattcttatttaacatgaaatacttcttattttcggaataaatgtgtcaccaaaatattgcaaaagttctaatataaatttatcatccaagtaggctatcgcagcagacaaaataggcgaaattcacacaacttaacacgaattttagagcattttaggccattcagaagcatttgtctgtctgtaacctccacactaaatacttaagttttagacctacattagaaaaggaatcagaaagatttgaattcaaaaaaagttagaagacaatttaagcaccttcttagcttgtaggatttgttccatttcaccccctcggcaaaatgaaatttgtttcagtgtagagagttgcatccgtggcagtggtccacactttttgatcgtttttagtttagaaagagcaagagcatcgggtcctttagaacgcgacctttgtttgaaacacttttgaaaccactaatattggataagcgaatgaagttgaggtcattgaattcgggataatacagaaaaacatacatacacacatggaaaaatgctacctgaactttttacttgtttgatgaatatgatgagaatagagagagaaagagagtaaacgggcaagccaactctcacggaggatgctaggaaactgagacaaatcgacggtttgtaaattgtagattctccaaatgaagtcaaaacttgattcgttcttaacgattgtgatcggtttgtctcggtttcacctcccgcaaagtaaaaacacctgtctatgaatgatggcccccactagctgttagtctatctttttggaacctggaacctgtccctccccccctgtctggtaagggaaagaaaaacgaacattgcattgaatgagcattgggaagcagaaggaaggacacggatcgaagggaaacgatgattgtaagtgttaattctttgaacttgagagaaaaggcagaaacaaatgcatataacatttagaattactactactgtatcgtactgagaataaatctgaaaacaaagaaatcagtgacataataaacctatgggtccctatgatataggggtaccgaatgaagcaaaagcgtaaaaaaacaatgaaa

SEQ ID NO: 470 - DNA, 624 bp, Aedes aegypti
atgaaggtgctaatcgttttggcggttgttagctgtctagcttcagtatatgcttccaaaaaggcgatcgtatttctgcaaggcacttccggcgtgtctggaaacgtaactctatcccagccatcatgtaccgagccggttttgattgaagtcagcatcattggactcagtcccggaaagcatggattccacattcacgaaaggggtgacttgagcgatggatgcactagcacgggaggccactataatcccgataaggtgactcatggcggcccagctgatcaagttcgtcacattggtgatctcggaaatgttgttgccgatgaaaatggaatagcaaagacctcattctcggacacggtcgtttcattgttcggatcctacagcgttttgggccgtgctattgtcgtccatgccggagtcgatgattttggcaaaactaaccatccagattcgcttaaaaccggaaatgctggaggcagactggcttgtggaatcatcggaatcctatcaccattcgatgaaccagagcagctatgcagtggcggtcaatctattagacccattcatgttgtgctaggattgatgataggcagtttgatagttcgtgcccttggatactga

SEQ ID NO: 471 - DNA, 918 bp, Aedes aegypti
cacagaccacgaagcggacaagttgaaagcccaatggggaacacaaaaatcacatgggctgttacagcccttctagttcatgcggtatcagccaccggagttaatccttttatggtaggaggtgtcccagtgaccttaggggagtttccagcgcaagtaggaattcacattggcccgactgtattctgtggtggcaccattctgaacagccatcatattctgacggccggaagttgcgttctggatggccaaaacaacctggtcgcagccaatcagatgcaggttcgagcaggagtgatcacaatcgacgcaaccaacccgaccacgctagtcgatcgagttttcgtccatccacattacaatcctttcacgtttgaaaatgacatcgccatcctgcgaacaaccacagcgttcacatttccggaaactgcccaacctcacattgctcccgtggagttgaaccacaaaattgtcccggaaaatagcggatgcgaagtagccgggtggaactggcaggccggaagcacaaccacggcacttcaacggttgtttgtttcgatctacccacgagcgtattgcaaccaggtttacaacggaatgattcagagacagatgatctgcaccacgacggccagtcagaaccaggcactctgtgtggcgaatcgcggcggtggactgtactatggcggccagttatccggaatcgcttcgttcggctttggatgcggtgcgaataacacggcggttttcacccagattcgctactatgagcagtggatccagcagcagtttgctcgcacagacaatcctcctccagggcccactccgatgccgggaattggcgggggatcgacaatgctgaacctatcgatggtggcccttcttctagcaacaataatcatcacacttgtgcgatag

SEQ ID NO: 472 - DNA, 1103 bp, Aedes aegypti
atcagtagtgtaagcagatcagtagtttgtggactcagtatgggatcagtcacgttgcttttggtgctgcttggaatcgccgctgtgcattctattcctgcttctgatggagcgcgttccaggcgtgatagtccttcgttgccggagcctggcgtatgcggtttgagtttggcagatcgcattgtaggtggaactaggactgccatcaatgcatatccgtgggcatccttgctgatggcccaacataaggatggtggccaaacaattccattctgtggagcctcgttgatctcggaccgtttcgtcctatctgcagctcactgtttccccgaaccgtccgatagtttcataatagcaaaggttcgactcggtgaatgggatattctgagcaaaaaagattgcgaagaagattactgttcagataatccgatcgatgcaacagtcgagagcttcgagattcataaggactactcgggtgaaccggatttccacaatgacattgcattggtcaaactcgcgaatccagtcaccttcacggagttcatttcaccggtttgtcttccggcggcggagaaatttagaactaaatctattagtggacgaaagtttaccgccgttgggtggggtgacatcaagtatgatgctaaaaaccgagatgttcaaattggaaaccgatacaagtttgaggtcaaacttcctggagtgggcctggaaacgtgccgcacatcttatcccaacctgaaggatacggaaatgtgtgctggaaagaccggtaaggacacttgccagggtgactccggaggtccgctatcgattgcggagaatgacggatactggtaccagtatggcgtggtcagctatggttatggttgcggttggagaggttatcctggtgtttatacccgagtgaccagtttcataccgtggattaaggatacaatgaaaaaactaagcaagactactgcaaagccaactaccaccgaaagctcttcaatttcatcagactgggaatatttgatccatatacttaataacatatatgttgactgagaaaatgactgtgctaagaaataaaatatttagtaatatttgacaaatgccat

SEQ ID NO: 473 - DNA, 1053 bp, Aedes aegypti
agttcttcatataatgatagcgatatcatgcatacttcacatttgattgtttctttatttttcactctactgtcgacttataatcatctctccacagcgctatcaactggtgattctcgtcagtacagatcgtgttcagaagcaccgccccaatccggagtgtatacaatagccctacaaaacggtttcgcaccattccaggcttactgtgaacagcaaaagtacggcggaggttggttagtattgcagaaccgctacgatggatcaatcagcttcaacagaagctgggacgaatacagaaacggcttcggaaataccgaacaagagtactggttgggactggagaaaatccatcaggttacgatgaatcagacgcacgaactgctgatcgtcatagagaatttcacggatttttcagcccacgaaatttactcgggattccgggtggaaaatgaagctacaaactatacgctacgtttgtccaacgaggagtactcgtaccacggtacggcaagggattcattttgggtatatcggaatgaacaattcagcacatacgatcgaatcaacgacaaatcgattttggactgttcaatccttaccggaagtggacactggcactatgattgtggaactgggtacaaaagtagtaatctgaatggtgaattcagcagagctgtcctcggaggacggcgtggtatgtggtggggcacttttggtggccaacaatttcctttgcgaaagaccagaatgatggtaaaagtaggcgaaaactagcatagtatcgtgccactgaacttgttattcaaatttattagtgaaatataatgccccatacttatataattgatgcaaaagatcaaccaaatatgacagaacagcttccagaatatacttgactaaaagttgttagattatttacttatttatccattattttttcagtttagtgcaacatcaataatctttataaaacctcatctcttaataaaatttacagatactctggcttcattgggccaacacatctgtgtattatatccacattttcac

SEQ ID NO: 474 - DNA, 2302 bp, Aedes aegypti
gttgcatatgcgatctaggaagtgtgtcgtccacttttgatgccatatcaggacttgacactaattctgaaacaatagaattcaattgcagttttgttagaaacacaagaagaaaaattcaagttcttcaagttctttgtgaccccatcagtggacgaaccccctgcggtggagaatcggggcgtaaaaagctcaccactcgagcgcgatcccactcagtctagtggagcgcctcgtcgattacggtgatcgagagcaacttcggaagaaacaacgccgcgccgcgcaattaaatattatcgtcgagagtggattgtatattcagttgcaatcgacacaacgcagtctcgcaaccgacctcgtggtggttggaccggttttcgcgcgcttactaattttgaggtgtttctgattataagttgtacgaaacggtgatcttgcacatattgcagcagtgacgacaatctgtagtgaccatagtgagcggtggcaacacgcaacacaatagcagtcaatcaggaaaagcagcggaggtagcatcagaaaatgagatcccttccaacggttgtgctactcgtggtagcactgtctgcccgcaccatcagcgcccagtgtctggcccaggatgacaacattcagcacaccaaggcggacaatcccctgtcccggaatcggctctacaagggtgaatccatcttcaccctgaaactgctggaggccatcaacaccgcaaccccgacggaaaacgtatttttctcgccgtacagtctgtaccacgtgctgctgctggcctacttcggagcacgagccgaaacggagaaaatgctccgaaatggccttgaattgcactggaccgaggataagcccgtggtctggcaggcgtacaacattggcaagaagtcgttggcggcccgattcagtcagagcggagacattcagttcacttcagtcgacaagcttttcttcggcaaacaggtcgccatccgtgactgtatggaggacaaattcttcgaggaaattgaaaagctagatttcgaaaaggatgctgatggtcaaagactgtacatcaacaactgggttgagaatgttacctacggtgagatcaaggacttgttgatccctggatctatcaccaagcagaccaagctggccattgccaatgccgcctatttcaagggaacgtggcagactgagttcaaaccagagcaaacgaagaaggaaatcttttacgtctccagcgaacgtcaggagttcgtcgacatgatgcacgtgttgggaaccttcagccacgctgccaatgaaaaactcggatgtcacgtcctggaaatgccctacaagggtcaagacgaatcaactcgcatctcgatgttcgtctttttgccaccggctgtccccaactcgctggagcagctgctggctcgattgacatccgacaccggtatcctgagtgaaatcgttaacgaaggtatcccccgcatggtggacgtcaaattccccaaattcaacatcgagaaaaccgttgagctgaagccggttctggagcggctaggtttgggcaagatgttcgaaaacggtgctgattttacggctttctcggagaaggaacagatcggcttcgacgaaattctccagaagtccaagatcgaagtcaatgagaagggttcgacggctgcctcgagcacggtactgttcagcttccggtcgtcgcggcccgttgaaccggccatgttccactgtaaccatccgtttgtattcctcatctacgactatggcacccaagcggtgctgttcaacggcgtctaccgtcagccggaataacaatgtgatagagcgagcggacagagtgttctaggtgataagactttgttttaatttgtgtactatattcaaccacacagaaggtagctaacatttccaactgtggagaaatgatcccgctggcctggcagtgagcgaagcggaatcaccctaaccaaaacgttttcttttatttattaaagaacaaacaagagaccaatcgagcttgtaacaaccgaaaaaggatctgaatccaaaaactctggaaataaactgtgtttacaaaacggtatacgtgcgaagttacacattttaatcacacatccatggggtggtccgaaagattataatcataaatattcagactgtattttagagggaaatgttttggtagacattgctaaaaagatgttttcgtttgacaatcgctcaagttaacatttgcttttaagcagtagggcaatttggttgactccttcccgactagtggattacaacagagttg

SEQ ID NO: 475 - DNA, 1746 bp, Aedes aegypti
aaatattgtggcgcagtgaatcagcaaatcgatcgccactttcaattagttttctagtgaaatttgaatctaatttcatgttctttgactttttgcagcacttgatattcaaacagcagaaaatgaccgaccgagaaagtataaagatagggtttgccgtgcagatatccggaaacaagtacgccgataaggtgcgaactgccctggaaggcgttggcaaggtggacatagacgtggacaagggtagcgttctggtggatacggcgctgccctggacagaagttcaccggttgattgagaacaccggaaggcgagcggtgctgtccggtttcggaggtcagtccgccgttgcgatggtggatcacggcaacgagctgagcaaggtacgaggcgtagttcggttctgtgctctgtcgactaacgagcagggagccgttgtggacggagtgatcgatgggctgcaggaagcgcggccctacaagctgaacgtgcacgagtgtggcgacatatcggaaggatgtgcctcggtgggtgaggtttacgactccaatgatatacaatcggacgagaccggaagggcaacgattcggttcgtgaacgaccggctggcagtgtgggacctcataggaagatcagtggtcataacggaagcggaaggggaccgaaggctgtcatgcggaatcatagcgagatcggctggcattttcgaaaactacaagaagatatgcgcctgcgatggagttacgatttgggacgaacgggagagacctctggccggcagtaaacggcgagagaatgctccagcgtaggtaggactcttcgatgggggtgggaattgatatggccatttaatggataatggtggactgagaaggtaaataatacagggcttataaagctatcaatggtttttaatcatcatcgatgacaatggacgtttcacaatccatgctcacattgtcgcgtgtcctttcattgagcagtttagctagatgggctctgcatagctgtttgtagttcacaatcaactccatacactttggaggagtactcaccgagatgttgatgtgcaccttaagcacttccggatccttttccaggccgatcaatcttgtcattagttccaccacatgcgcaaactgctccttcttgattcggtaactcatttcacctatcgtagccttataccaaccggaatagcttcccaaaacgcgttcgttggacatgcaaatctccctagcgctcaccatcaggatcatgaaggtttcaaagtctccggcatctaccactcggttgaacaggtccttcaaaatgcctttcacgcgaacaatttcaaccttatcgccttcgattgcaaccgccaccatgtgcagcagggcgagatagtacttccaggacaagctcttcgtttttgccgaggcgaaaagcgtttcgatcgcgttggcctggtcttgtaccacttccagcatgattcgtcctaatgtggtacttcggcggtcttcgcattccgctctccactgctcttgcagaccaacagcctccgataacgcatgaagtttctccttcccaagaagcagttgcaggtgttgggtacggagccgagtcaggtccggatccggtagatgggattttagccgttccagatagttgcacgggaccacattaggttcggcgataaggtcgtccagaacggaattgaaactgtcgtgaaggacttcccggagggtcgtagagtaggatgtgtct

SEQ ID NO: 476 - DNA, 1421 bp, Aedes aegypti
acagtcgtcagtcgagcagccgtgcagaggcaaccagtaataaatcgagcgaaaagggtgaactcgaagaacgagcggcggtgactaaaatttacgcgacactaggcaatttgaaacttgatcgttttttgttcgttgcttccgaaaattttcacccataaatcgtgcaacgtgataggcagtagctgtgcgaaaccgaccgctaaaagcaaattaagaacacagtgaaaattgcccggagtatttttcgagaggattaacagtttttgctgcaatttgcaggacaatagagagaaccgaatgcggctttaccgaagttctatgaaaacagattcgttattttgaaacccggcaaacagttcattactcattgttgcgtgaataccctcgttccggtgttttggtgctttggagtgcagaattgtgagcagcaacgcgtgttaccgatctcacacactagcacctctgcccacgtagcattatcacgtcgaacccatcaaagaatcgttccactggagactgcagtctgacggtcgaaaaatgaagttcaacttgtttgctgtgctgttgattgcggcatttgtttgcgccggctatggggccgaaattccaccacctacagttcccgaaaatggagatgttgtgcggacataccaaggagtgaacgtgtacaaaactgaaagagcctgtgccagacagggaggcctgtgcgttcagagaaacgactgtaaatcacttaccgccattaaaggactttgtccggaaaatgccaaccgcggtgtggagtgctgttatgaagtgaatccacccaaaggacttcggtgccgtcagtatgatgcaaaatgtgacagatggtgccatcgtgtgcagcaaatgccagccgtagactgcgccgaagggcttgtatgttgtgcaagtgacagcaaaaaatgatgacttgttatgttttcttgagagcttgcctatataaagtacaaattttaaaataagttagttaacgatatatgtctaccgaacgtttgcttaaattcacttttataacgccatcaatgagtgatacaatcggaagcggttcatacctgtgctgaacatttgggcgaatgtatgacgcattgtcgatcgcaagctttgacacgtagagcaactgattgcggtgaagaagaaacatgttgtgtgctggtggtataaatgcatttctatgacaatgataaatttgaagatcaaacataggtgtatgcaacatttataatgtttttttttatgaatcaagtgtaaaactgagtacaaataatcgatgtgtttaattaatgttagtatgtattatataaatgtttttgaaatatggaaataaattacagacaacagttcaataaaactattaaaaaactggatggaaatacattacatgtgtaaaatatagg

SEQ ID NO: 477 - DNA, 2143 bp, Aedes aegypti
cctcatcaatatcgtagcaaaagtcgatcagttgacacgtgtatttgatatagttctgaatagactcggaaatggattacaattggttcgttatattcacatgtgccattttaggagcggtctcgagctcagatttgggaagtgaaagtgtctccaatataaccacatctgatgatcgtcagggcagagagtttccattctattcactcggacggattgcgaatagggtgtgtacgggaactaatggtttattgggaacgtgtcagattcgaggtgaatgtgcttcaaatggaggaataggatcaggacggtgcagcaccctaactgtccaggctgtgtgttgcgtgtatattagcacctgcggtggatctgggtcgaataatgtaacctatttccagaacgctggctaccctatgccttacaatggaggaggagcctgcacatacacggtaataccaccagacagcactgtttgccagttgagagtggacttcagcgcatttacgctctcgcaaccgaacggagacggattatgttcggttgataacatccaaatatttggcggtagctctcgggtgccaacaatctgtggtgataataatggacagcatgtgtatgtcaacttcaatgggcagaactcgatcactattaccgtttcgaccactgcggcaacatccttcaaccgattgtggaatctacagttgagcatgatttcttgtacgagcacttatatagctccggccggatgtttgcagtactttttggacagcgcaggaaatattcaaagtttcaattatggctcatcagctaattcggcattcagcgctatggggatggttggtactcgacagatgtccaaccaaaactatggaatttgcattagagcaggagccgatcaatgctcaatatcatacaacgtgccctcaggagacctttatgcgtttacggtaacgggtgacgtattagcattaacacaagatatgctcggtactcctggcgtcgctatggtaggaagcggttgtatgtcggactatctcattattccgaatccaactggtgtggcgagtgacaggttttgcggtatggcaatagaaccagttacaaaattcccattttactcgcttgggcgaattccgaacacggtttgtacgggcactgatggattatcgggaacgtgtcaaattcgaggcgaatgtgctgcaaacggcggaattgcatcgggacgttgcagcactctcacgactcaagccgtatgctgcgtttatattggcacgtgtggtggatctggatcgaacaatataacctatttccaaaacacaggatatcctacgccattcaatggaggtggaacgtgtacttatacagtagttccgccggacaataccatctgccagttgagagtggacttcagtgccctgacgctgtcgcaaccgaacgcggatggagtgtgtaatgtggataacatccaaatttctggcggtagctctccggttccaactatctgcggcgataacaacggacagcacgtttacgtggcctttagtggaacgagctcgatcagtatcactgtttcgacgacggcatctacatcgtttagccgagtgtggaatctccagttgagtatgatttcttgtaccagtgcttacgcagcacctgcaggatgtctacagtattatttggatggcactggcattgtgcagagtttcaattacgggtcagcagcaaacccgacaaccacttcctcagttggctctcgacagctggttaatctaaattatggcatatgtttccgatcaggagctggacagtgctccataacctatactccgccatcgacagatatttatgcgtttactttgtcggaccttgtaacgagcgaaaacatgaccaaattgggaaccgcttcaggcggttttaagggaacgcaatgcaccacagactatctaattattcctaatccaaccgggttaacggatgacagattttgtggtatgggaattggaacaactataagtaatacgactccctttgttttgtactacatcacaaatggtgacgaaaaaggagatgatggaaatcgaggctttagttttcagtatgcccaaaatgcgtgtccaatttccgttggctaaatgttaaataa

SEQ ID NO: 478 - DNA, 827 bp, Aedes aegypti
ggccgtctccgtctgtctctttaactcaacggttcgtcggcactctcgtcaatcgtgtcgaagccaccaggaagtgaagacatttttgcagctgttttcttcgaaacaatttgatagctaattcccagtcaaaatgccggctaaagcagtttgtgttctgagcggcgatgtcaagggcaccatctttttccagcaaaatggagattcggatccggtgaaggttactggcgaagtgaccggactgaagccgggcaaccatggattccacatccacgagttcggtgacaacaccaacggatgcacctcggctggaccgcacttcaacccgcacggcaaggagcacggtggccccgatgccgccgaaagacacgccggagacttgggcaacgttgtcgccgatggcagcggagtcgccaaggtcgatatctccgacagtcagatttccttgtccggaccgctgagcatcctgggacgcactgtggtcgttcatgccgatcctgatgatttgggcctgggtggacacgaattgagcaagtctaccggaaacgccggtgctcgtctggcttgcggtgtcattgggatttgcaaagcataaaccttccaaactgtaacggttacggaagagttccacagaaaacattcgaacgggattcgagttgcatcctcgtactaacctaaaaccttcccttgggaaatggaacctgtgtccttaaaaaaacgtcgatttgatagacggaaagtcccttagttgtatccatatgttctatgaacaaattgtctactgttttgtctggtctgaataaagtcaaaagttcattactcaaaaa

SEQ ID NO: 479 - DNA, 3207 bp, Aedes aegypti
atgtacggtggtaaactggcgtaccttgtggcgctgtccagcctctggttggtacacgccgtagattacgcgcccaaaatggagactgttaagcagtggagcttcctgtcgtacaattttccctgggactaccccgcaaacgataaggagttctacaacccggaaaacatcgttgcgaccggtatcgaagtaggctacgatcgcatcttcgtagcaacgccgcggttgttcagtggagtgccggcaacgctgtctgcgatccctcgcggtacccatggtgattcgccagcgctccaggcctaccctgattggacgcatcacaccgccggcaccaaggagtacaactgctccgacatcggactggtgtcggtctaccgtatccgaattgactcgtgcaatcggctgtgggctttggacgccggtgtttcgcgatcgctggaagacttcgaagtgacctgccctccgaagattttggtctacgatctacacaccgatcaggttgtgcggagaatcgatttccctccggaggtcgtccgacgtgaatcgctgtacaccaacatcatcgtagacgaaaccggatccaggccggagaacaactgtgacgatgtgttcgtctacattacggacaccgtggcgccaggaatcgtagtctacgacagtggaaaggatcttacgtggcgtgtgagccatccggccatgtacccggacccagactttgccgaatccaccatcttggagcaccgcttcaccctcatggacggagtcgttggcattgctttcgatcaggaagccggcatcatctacttccaaccattggctactgacagattgttctctgtgacgacggcggcacttcgagctggacctcttccattcggaaaggatcttcccgtcaaactggtcggccgtaaatcatcccagggaatcggtctagctgtatcgccacgtggaggcaccatcttctattcgcccttcacggaaactgccgttgcatcgtggaacccccgtaccaatgagcatcagatcgttgcgcaagaccaggaacgtctgcagttcgcagctgacgtccgcaccccggcccgcgacggaaccgccctctacgtcctgacctccaagttccaccgattcttcctcaagaacgtcgacgccaacgagttcaacacccgtattctgcgcatcgacggagtcgtcgctcccaccctaccaacgatagccccgtccggattcggaccaaccgtcgagaccaactctccgttctacagcttaccggccgtaaccccgtccgttgccaattccttcaaaccacttccaccatccgtccccttcaccaagttccccgcgcacaagtcccccaaccccaagacctacgccttcatccagaactactacgtgaacaacaagcaaccatacgtttacgaaccggttccagtcatcgacaaaaccaaaaccaatcccttcttcatcctgaacagtggcgagaagcccttccccgcgacgcaacagcgaccccagtacggtctcaacggagaaatcttcttccccaagatcaaccaccacttcaacgacttcaacggccttcggtacgccaaaagcttacgggccaatctgacggcgacgccattgttctctgtgacgacggcggcacttcgagctggacctcttccattcggaaaggatcttcccgtcaaactggtcggccgtaaatcatcccagggaatcggtctagctgtatcgccacgtggaggcaccatcttctattcgcccttcacggaaactgccgttgcatcgtggaacccccgtaccaatgagcatcagatcgttgcgcaagaccaggaacgtctgcagttcgcagctgacgtccgcaccccggcccgcgacggaaccgccctctacgtcctgacctccaagttccaccgattcttcctcaagaacgtcgacgccaacgagttcaacacccgtattctgcgcatcgacggagtcgtcgctcccaccctaccaacgatagccccgtccggattcggaccaaccgtcgagaccaactctccgttctacagcttaccggccgtaaccccgtccgttgccaattccttcaaaccacttccaccatccgtccccttcaccaagttccccgcgcacaagtcccccaaccccaagacctacgccttcatccagaactactacgtgaacaacaagcaaccatacgtttacgaaccggttccagtcatcgacaaaaccaaaaccaatcccttcttcatcctgaacagtggcgagaagcccttccccgcgacgcaacagcgaccccagtacggtctcaacggagaaatcttcttccccaagatcaaccaccacttcaacgacttcaacggccttcggtacgccaaaagcttacgggccaatctgacggcgacgccattgttctctgtgacgacggcggcacttcgagctggacctcttccattcggaaaggatcttcccgtcaaactggtcggccgtaaatcatcccagggaatcggtctagctgtatcgccacgtggaggcaccatcttctattcgcccttcacggaaactgccgttgcatcgtggaacccccgtaccaatgagcatcagatcgttgcgcaagaccaggaacgtctgcagttcgcagctgacgtccgcaccccggcccgcgacggaaccgccctctacgtcctgacctccaagttccaccgattcttcctcaagaacgtcgacgccaacgagttcaacacccgtattctgcgcatcgacggagtcgtcgctcccaccctaccaacgatagccccgtccggattcggaccaaccgtcgagaccaactctccgttctacagcttaccggccgtaaccccgtccgttgccaattccttcaaaccacttccaccatccgtccccttcaccaagttccccgcgcacaagtcccccaaccccaagacctacgccttcatccagaactactacgtgaacaacaagcaaccatacgtttacgaaccggttccagtcatcgacaaaaccaaaaccaatcccttcttcatcctgaacagtggcgagaagcccttccccgcgacgcaacagcgaccccagtacggtctcaacggagaaatcttcttccccaagatcaaccaccacttcaacgacttcaacggccttcggtacgccaaaagcttacgggccaatctgacggcgacgccgtaa

SEQ ID NO: 480 - DNA, 6427 bp, Aedes aegypti
aactcatcaaaatagcgaccacggcggcagcatgacccgtcggtggcatccgacctggtcgggtgtgctcctgctgttattcggcttcccttcgattctaacctgggcccaacagcaacagaatcccaacgacgtgccacgatacaatccactcgatccgttcaatcgacaacgatacaatcctacctcaagcaatttccagcctcagtcaaacccaaccgcgagcaacgatcctcggaatccaaacttcggcaaccgagatttctacgggaccgactcgaacagcatcgacaatcgcttcgatcccagccgtggcgatcgcgatcgtgatcgagatgtactattccaatcgacgacgcctcgggagtttcctggtacgcgattcggcacaacccctcgaccgagaacattcaatccgcagagcaacagaaatgttttcctggaccaatccaacaatccgttgaataaagagatcacgtactttgtcgtggcatcccgcatggtccgtcccggtcagatttacaaggtatcggtgaatctgctggaggcgcaacatcctatggctgtacgcgctagtatctcccgtgacggcgtagaacttagtagcgaactaaaatcggtacgcgttggtatcccggaaacgctacttatgcgcatccctccgaccagcgtagtcggcgactataaactacgtgtggaaggttcttacgaaaacaccttcggcggatacattttcgtgaacgagaccaaactgactttctcgcaacgatcaatgacgatcttcattcaaacggacaaaccggtctacatgcagggagaaatggtgcgattcagaacgatcccgattactactgaactgaaaggcttcgacaatgccgtcgatgtctacatgctcgatcctactggacacatcatgcggcgatggctgtctaggcaatccaacttgggatctgttagcttagagtacaaactgtctgatcaaccgatgttcggtgaatggagaattcgtgtgattgcccaaggtcaaatcgaggaaggaaaattcagtgtggaggaatattatcagacgagatttgaagtgaacgtaaccatgcctgctttcttcttccaaaccgatccgttcattcacgggaaaatcatggccaattttaccaatggaacacccacgagaggtaacctaacacttaaggctaccattcgtccaattggttggatgaatcccaaagctatcaatcacatgaacagagtatggaataccggcaaccgtcgagagttggaccctaacatcccatactacctgcaatacacgaacccggatctgttcaacgctcagtcaaccttcacaagccagctcaaccaaccagacagccaataccaagatcaaaggtatcagtcgaactatcaggacagctatgtgatcgaacgacatttcaactttgatgaagagtggcctttctggatcaagaaaccgatagattctgccgagcaatgggattcgtggacaaacacctacagagaatccctgccatacttaagatacttcaacggaacgtatcacttcaagttcccgatgtcagaactgtcccaactgttccaaagtaatctcgctggaatggaagtgttaatcacggcccgtgtaggagaaagattctacgacgaagtcattgaaggctatgccatgacacggatctacaattcttcgattcgagttgcctttatgggcaactctccccaggtattcaaaccctcgatgccgttcacggtgtacctgatcgcggaataccacgacggatcaccgttaccaatcgatccgctatatccaggtcggatggagttatccggcacgatcgatagccgaagcggtggaggccgcaacacatacgacgtcaaggaattgcaaatgtcggacaagcctggcgtgtgggaattgaaaatcgatcttcgcaacgatcttaatctggagaacagcaagcagacgaatgagtttctgaatcaaattcaatcgatgcgactctcggcgaactacatccacccatcgggtgaacgggcgagcgctgaacttctgctgctatcacacttctccccgaacaaccataacataaaggttctgacgagcaccagagacgccaaggttggagagtacatgatattccacgtacagagcaatttctacattaaggacttccattacattgtcatgtccaagggaatcgtgctggtaaccggacaggaaatcatatctggtggtgtacgaacactgtccattactttgagcgcagaaatggcccctacagcaacgatcgtagtttggcacatcggccggtacggaaaggttatcgcggacagtttgactttccctgtgaatggaatttccagaaacaatttcacggtgtttatcaacaaccgcaaggctagaaccggagaaaaggttgaagtggctatctacggtgaggccggttcgtatgtgggtttgtcgggaatcgacaacgctttctacaccatgcaggctggtaacgagttgacttacgcgaatgtgattaccaaaatggcaaactttgacgaacaaacgaatggaacattcaagcaaacgtggatttcgcacgagggagatccagatgagctggtttactatcccagttcaacatttggcatagatgcgaaccgtactttcgaatacgttgggcttgtggtgtttacggatggggtgattcctcggagaccgttgagttgtgatccagctatgaactacagcgaatgcttgagcggaagatgctacaggagcgataaacgatgtgatggctatttcgactgtgaggatggaacggacgaagctggatgtgataacaggaatagcacggcgttggctgaattccgaaagtatcgattcaacagaatcttgaggcactatcagaatgtgtggctgtggaaggatatcaatatcggaccgcatgggcgattcattttcaatcttgaagtgcccaaaattccggcactgtggatcgtttctgctttcggtgtgagtactagtcaaggtttcggtatgcttcggaagcctttggaatacgtcggagtgcaaccgttcttcatcaatttggaaatgcccacggtttgtaggcaaggagaacaggttggaattcgtgtggctgtgttcaactatcaaacagtggatattgaagttactgtggttctgcatagctctccggattaccagtttgtgcacgtggaagaagatggtattgtgcgatcctacaacccaaggacatcattcggcgaacatcaattctacatctacatatatgcgcaggattcttccaatgtatacattccgattgttccgactcgtttgggtgatattgaagttaccattcacgcatccactcttcttggagcatatcaagtcagtcgaaaaatcaacgtagaacctgatggcctcgtccaacatcgtcatcaatctacgctgctggatctcagtaatcgtgcttacttcttccaatacatgcatgtgaacgtaacggaaactcccattatcccatacgaaatcgatcgttactatgtattcggttcgaacaaggctcgtatttctgttgttggagacgtggtgggcgccattttcccaaccatgccagtcaatgcaacatctctactatcgttgccaatggactcggccgaacaaaacatgttcagctttgcggccaacttctacaccatacagtacatgagagcaatcaaacaacgtaacaagaaaacggagaaacttgccttccactacatgaacatcggctaccagaagcagctcagttatctcaatgacgatggttcgttctccctgttccgtgcagattggaatcagtccgcgtcgtccgtatggctgaccgcttattgcgctaggattttctcggaagcatccttctacgagtacgaaaatttcatctacatcgatccattggtgatccagaaaaacatccactacatcctgcagcaccagaaggatgatggttctttctgggaagttacctggctaccggatcggaaggtgaatcagtcatccgagcatcctcgcaatgagatcgtccgttccaagaacatcacactgacggcacatgtgctgataacgctcgtttcggtcaaagatctgtcagggcgactgggttcgagtgttgccttggcagaacaacgtgcatctcgatacatagaacgcaacatcggattgattaaagactacggatctccgtacgaaatcgctgtggtgagttatgcattggcccaagctaaggctccgcaagctgagcatgccttcaaaatcctagccagcaagatgagatcgatagccgatctcaactactggggtaacgatgaagttccgcaaccgccgagcaagttggaaaatcaaaagtacttcaaccttccgcgactaccgtacaaatacgattcactcaacatcgaaacgacggcctacgcattgctcacctacgtatcgcgtcaggaaacgttcaccgttgaaccaatcgtccgctggttgaacagtcaacggttgatggacggcggctgggcttccagtcaggacaccggaattgccatgaaagccctcactgagtacagtacccggaatcgcgtggcggatgtcacttcgctgaccgtcaccgtggaagctacgtctcttcctggagaatctaaggtcctgcatatcggacagcacaatctggcgacaattcaggatattgagattccaaacgcatggggtaccgtgaaggtccaagcaaaaggtgtgggttacgctattctccagatgcacgtcgagtactcggttgatacgtataagttccaaacgatgcctccggtgaaatcgtttgacctgacaacgcataccgtgttccacggtaggaatcagtctcacatcagttatgtgatctgccagcggtggaccaacactgccgaatcgatccgttctggtatggccgttctggacgtagccgttccgactggatacatgattcagcagcagaagcttgactcgtacactatcagccaacgagtacgcaacctacagcgtgcacgctaccaggagaggaaggtgttgttctacttcgactatttggacaacgacttcgtttgcgtgaacttcacactagaacggtggatgcctgtggctaacatgtcacgatacctgcctattagggtttacgactactacgcaccagagcgcttcaacgaaaccattttcgactctctacaaacatatctgctaaacatttgcgaagtatgcggtagctcccagtgtccgtattgtaggatctacaatactgccatccggaatccggtgtcggttctgttgctgctcttcaccagcgtactcatagttgcccgccactaccgaatagtgaatccgaacagttggatcttttggaacgattaggaacgattgctcacaagagctgccgcacgcattaaaaacgaagagcagtgtccatcagacttctgtgtacataatccctatctaatgcgaaatcgagaatctctgcttttttaaacggagactgcgcgacagcgtgcaattgcgaattcgtctatgatgttcatttttatacaaagacttttttgagttactgtagtgtagtattgtccagacatcatactcgaatcgtactgtgtgcatttcatgtcatgtcaattttccgtgcgattccatccaaggcatttgtgtacaatgaacaattcttccctttacatttcgcaacgagacatcgcgatagacgtaggaaaaagtaagcatgaagcaatgccgtttagattaggagaaaaacgttattttctcacgtgttcgattttttttatttttagaagtgctaggaaagcgacagttattgttttattattttaaatattctttctgtagattgtatgtagtacgaattgtattcgtttactagccttttaggatttattatcttacgcaagcagaaatcttcaggccgtccaaattttctggtcataacattttttttttttatttttaagatcaacattagttttaattttactccaggaggtagcaccacaaataacttaatactgaaataaaatgacaatgatcttttaggtttcaatgtccaataaactcagcatcgtactatagtactaattccgttccaacacttcaaattttatcacattactacgtttaggcaaacgataacgaatgatacaaattagtgggtgccttaactgcaagttggaagataactatctcagcggaatgaatgcaccatcatttataagaaaacgattttgtatcactagaacctgaaaaaggacggagatctgagaagcgaatgtttctaatgaaaaatgtttagtgacaaaaaacgatcactgcatagctcgtagatgtgctgataaaactacattttaaaataaatttattgaaaat

SEQ ID NO: 481 - DNA, 1011 bp, Aedes aegypti
atgtactgctgcaacgtgaccgacatcaacaaggcgatcgcatgcgcctccaatggcggtggatcggaaggaacgtcctggcgctacatccacatgcggaacgtcaccgtccgggagctggtgctgaacgtgtccaatcggtacattaagacgctcctgtccgtgtcgtttaccgacgggtcgatccagaagattagcacctcgtttacgcggttttcgtcgcctgtttgcttcaacatctcgaacaacaatatcagcgagatcgagccgagggcgctgaaagagctgcggaatctgaaatcgttggacatttcgcacaacaacctgtcgacgattccgtcgatgggagcgaatctgacgctggacatcagaggcaatagcggcatgctgtgcaaatccctgctggagtcgctcaaggaaggcatcaaattcatcgacgaaacgtctactttctgcctcacgaatcgtaccttcaactggttcgattccacagacttcatcccgttgccgcagctgctgttaagtcaacgaatccagaacgactgccctacgaattgcacgtgcgctttggaacggctaaacttcgatctgaacaacacggatcggaaaacgttcaccgcccaagtggactgctccggactagggctgatggatttcccggagcatctcccaccggacacggtcacgctgaacgtatccaataataatataacaagtctgaaggccttgattgggaagtcctacagtaccgtgcatcgcctgtacgccgataacaaccagatcacctcgctgagcgatctcgagggaacagacttcatctcccggttcaccgtcttttcgatccggtggaacaagctaaaaaccatccaaacctatcagttcagatccagcttggacctaggttcgtacatgttcctcgaggggaacccgatgacgtgcgaccgcaccgcagccaagaaccttaaaaactggcttctcagcaagaaggccaggtgttcgatcacgacatga

SEQ ID NO: 482 - DNA, 2031 bp, Aedes aegypti
atggctgacaatggctacgagaacttcctaccgacggaaccggaaggaagttataatatacgattgaataatacacgtcatacgcctacgtcagatgaggaatgtatgcttggagtggcctacaactatatgccgtggatgtttccaaatggaacacttacagtcagaaaccaatcaatggcccttgatttatcgaacctgaggctatccgatgacggcatgtcgtccctcgtcagaaacttgaacatgttgtcatcactgaatccagaggttcgtcctaaaatgccacatctgctgtcgttgatagcattggacatgagatactgccggctgcagtctttgccaccggattttttccacaacctgcctaaactggaatatctgttcctatcgcataacttcatcagcaaacttccggccccgttattctactctttggggcgactggttcatctggatttgtcacatatggatagtcactccctccgtgatgatgaagcacgtatggaaaatccattcatgagactgatcgaaggcatggacatggatccaaacatttttcaaccgctgcagaaattgcgatttctagacttatcgtttactaaactggacctgaaggcgttcatgtcgatgagctccttggggggaaagttggagtacgttagctactgctatacagaccttccggcgctgatggactacctgtttctgatggaaagtatcaatatgcttgacttgtcgggcaatgtaggttgcgcaagagcattgaatgctggaagttttcagctattgcgagataccctggaagttttgttcttcaaaaatgctagcattcaacagctagattggataaccggtatggataagcttcgagtgttgaacttgcgcggaaattttctagcgtcatttgaaggggcgcctatgcgggatttagtgagcttagaagttctagatgtaagtcgaaatttcattcagtcgtggcaacatcgaatattccagtttaataataatctgaaactactaaatgtgagaagcaataaccttctgttgattcctagtagcatgttgagagatttcgaaatcttaagctatttggctcttggtggtaatcaattgcagtgttcatgtaattatgtattactattgaatatggtgtttggaaataactcagaagaaatcaaaaaagataacagtacatcgcaagttactacccaacagcccatttatacggttggtcatttaaacttgtacgactacaatgaggaagaatacctttgcatgaattttaccagcaagaagaaagtgaatactataaggctccccgtttgcggaagagaagacgaaggatcttattcgaatgtgagtgaagaaatgccagagtcgatagaagatctaatagaagattaccttgtgatatacatagtttcttgtgtggtagctgtgatcttgctgggacttgccgtgctgatctattggtactggttctacatcaagtacttcttcgtgctgctgaaaaattcggcgattctgagtttctacaacgacgataaagtgtatctggacaaaagttgtttggatgacgaagcgaagtatcagtatgacgtatttgtaagctacagcgataacgacagagcttgggtattagacgaaatgttgcccagcttggagcaggaagatctgatttcggtatgcctgcatgaaagagactttgaggtcggatatggaatactggaaaacataatctcctgtatggatcgttcgcggtgcctaatgcttattgtatcggaatcgtttctgctcagtcgatggtgccagttcgaaatgcacctggctcaacatagactattagagacgcggcgcgacgagttgattttggtcctactcgaagacatccccaagcgcaagtgcccgaagacactcagctacctgatgaagacgaagacctacatcaagtggccacggcagcaaacgcgtgaccgcgagcttttctggaagcgtttgcgcaaagctcttatgtcgactaagcgataa

SEQ ID NO: 483 - DNA, 2239 bp, Aedes aegypti
ggaacgatgaggtcgattttggcagtgaccgtagtctgtctgtttgctctggcaagcggcagctacatgaccaaggatgttaagtacggtgatgaaattttcctgaagaagcagaaagctattcttgagattttccaacacatccatcagcccgagctgcacacgtcgtcatgggaggaatccaagggcttcgatatcgagcagtatttggatcactacaccaatgccgaagccgtgaaggagttcctgcggttctataagcacggtatgcttcctttggaggagatcttctccattcagaacgagttccaccgcgaagaggtcatcgccttgttccatctgttctactacgccaaagattgggataccttctacaagaccatggtctgggctcgcttccacgtcaacgaaggcatgttcgtgtacgctttgaccgtcgccgttctgcatcgccacgatatggaaggcatcgtcctgccagcgccgtacgaaatctatccgttctacttcttcaacgatgtcgtaatcagcaaggcccaacgctacaagatgcaaggcttttacaagatgaagaagaacaatgacgtctacactgcgtatatccctagcaactacaccggatattacgtccacactggcccagaacagcgcgttggctacttcactgaagatattggcctgaactcgtactactactacttccacgctgactatccattctggatgggtggcaaggaatttggcctgtacaaggaccgccgtggcgaattcttcctcttccaacatcaacaactgctggcccgttactacctggaacgcttgtccaacgacctcggagtcatcccgcccttctcgtggcacaaatccatcaccaccggttactatccataccttcgctactacaatggaattccgttcccggtccgcgacaactattacagtgcctccgtcgacaagagctacgttgtggaacagatcgaagacttcgaacaccgcatcatagaagccatcgactatgggttcatcgttctgcccgatgggaaatatgttaacatcaccactccctctggaattgaatatcttggaaatttgattcagtcgaacggtgacagcgtcaacacccgcttctacggctacttggaaatcctagccaaatacttccttggtggatctttcaagctgcaacatgaataccgagcgattccatcggtcctggagaagttcgaaaccagcatgcgtgatcccatgttctaccaattctacaagcgcatcgtcgagtactactatcgcttccttgatctccttccatcctacaagaaggaagagctggacttccccggagtcaagatcgaaaccgttgaaatggacaaactggtaacctacttcgataagttcgacgcagacattaccaatgccgtggacgtggaggtattcgacgaaaccaccatgaagggaagtgacatgaagaagttcggcaagatcgcccactatcaaggcgaagacttcgtcatctatgctcgcatgcctcgtctcaaccatcttccgttcaccttcaagctgaacgttgtgtccgaaaaggcccaaaaggccaccgtcttcgtctacctgggtcccaaatacgaccagtacggaaacatctacggagtcgacgccaaccgtgagaacttcttcgagctggaccatttcctggttgatctggtcccggggaagaacgccatcacccgcaactcccaggacttcagctggttcgtgaaggaccgcaccacctactttgagctgtaccaacaggttatgaaggccgtcaccggcgaaggcaagttcccgctggatatgtccgaagctcactgtggcttcccagctcgtctgatgctccccaagggcaagaagggtggcatgccattccagttcttcttcatggtcgttccctatcacgcacccaaggttgaacagttcaccggtttcgatcacaccctgtcctgtggagttggatctggtgcccgctacctggacgatctacccttcggctaccccttcgagcgcaagatcgatgaaaatgcctggtttaccccgaacatgaagtactacgacaccctcatctaccacaaaagtgaaactgaagtcaactccgtggtgatacactagttcaaatgcccatccctcatgcgaaacccattcaataaaaattgcattccattatcggctcccgaagcactgcgtaatgccaacaattaaatgaaaa

SEQ ID NO: 484 - DNA, 1602 bp, Aedes aegypti
atgcgttttctcgcgccattaggaatagttcttttagcaatagtttctcactgccaagggcagggctttgacccaacggttggggcaacgccagaaaatcttgcagctgtgtcccaaagtgtaaccaacttggcccagaagatcagtctggccattgccaatccaaagagtaaaacggaaatattctccccagtgagcatagcaggtgccctatcgttgctgttgctcggttccggcggaaataccagagatgagctgatgaacgtgatgggtttccaacacagtcggctcacatttaccgacatccacaaaagctttggtcggttgttccaggatctggtctcgaatgatcccgcccaaaacgtgaccattccctggagggccaatgacaagtgcaacaacaacgactacgactacgaagactacgcccaatcgaagcccacaggccagcaaaggggcagaagagacaccgactctgtcgccgagataaaagttgccaacggagtatttgcgcccaaaggcatgcaatttgaccagaaatttcaactgattgccgaacggttttacggactagaaacccattatgtggacttcaggaccaaaatacagagtgttattcataccatcaacgcatggatcagacgcctaagtcgaggtagaatatcgcagattgtagcgcaacttaataccacctcaatgctcgtgatgactaacacgctctacttcaaagccctatggcaacagcctttcatcatagaaggtactaaggctaggccatttttcctagaggggccaagcaaacccgccattttaatacccatgatggtgaatggtggttgctttccttactattactggcaaaacgttaaaaccaaggttcttggatttccatacaaacaaaaaatcacgctttacgtctttttaccagatgattccacaagagaaaaaatcagattattgcaaacccacctcaatacggtggctctggacgacattttcaataaaatggagatgaaacttgttgctgtgcaatttcctaagctacacgtgcaaaactctttgaacttgaggcagactcttgaacaactaggagtgactacaatatttgaccaagaagaaagcaatttaaaccgcatttggcacaaccgcagcaccataatgccttacgactatatggatgctttcgatttcctggaggacacccgcgagaatgccatcatggagcttcaccatcagcatgggaactgcatcatagtcgagaaagatgtctccaatcgggttctgtgcgaggccagtagcctctgccgcttcaaaggcggaagctgtgtctgttgtgcagcattgacctcaagcaaaaggcttcgaagggcttacgacgggtattatttgcagtcccgtttacatgtcaacgaaattcttcacaagatcgacctggtagtcaacgagaagggaacggagagtggtgcagtggtgatgccgtttatggacaggaactttcctcaggtgaatttcaaagtgaatggaccgttcttgatattggtacgggacgagaagactaagcttccgctgtattatggaggagtgtttgatccgagactatga

SEQ ID NO: 485 - DNA, 3844 bp, Aedes aegypti
tgctggaacacaattctccgctcttctcggacttcctcgtgtctcgctctctgatatcgtctgataggcaaactgggtgtttaatcggataagttggtgtatgtgctcatatcaaccgttttctaattcaaatttttcagaacaaataagtgatgttcgcatgtccatcgtatgtacttttagttaatgaatgtctttcaatgaaacatgcctttttatcgtattgacttaggtcgcttacttatgtaggtactaaggttggcgcacgaaatgaaaattatgtcagttgcttcaaacactgttatagatcccttttcaggataaggattaaattgcgacaatttataaatcagtttacagaatcatgaattttcaactttagacatttgcattgtggaggtgttacgtaagttaagaatggattacatttaataacgaaaaatagcatatttttcattggacaaaagagtgaaacgtcctattaaaaatacgtacagatagaaactaggaatgtatcgatgaataatttttgacagtacctttcagtttgctcacgactaacggaaaatctacttttcaattgggctataagaaaagttctagttcataagtgtatatcatctcatgatctcaaaataagttcttctcctgatctgatcataagaccgattttaaatctttttgaggtttgtagtaaggtagaggtttagaggttgtagtaattaaaacacctgtttttcatccgtattaatttttttttaactttttttttaattaaaattcgaaattcttgaacgtgtttaatcaatgcaagttctacgttgaaattgcaagaaactaactttgtttaggaaaacaataagttcctagtccacattatggatcacttgttaaagctgttaatattcggtgtttaaaatcttcattaagtatattattgaacaatgatgagccagagtgcttaaggattaaattgtatcacctgtgggagcatatgtatgttgacgatgcttctaatgaaaaatgacgatattttggtaaccatgtgcaacaactcaaagttggtcgagatttatttgattttccggtttaatgttatgctgaacattacaaatgatagaaaccaagcagtataacaaatttatttaacgacaatgttttatatatcattgagcataagttacgaaccgccttgatgagggtaaagcttgggtaatgtgtaaaaatgtcaatcttgccgttttgaaccgtcttcccctaatagcggagatgttgtcagctacagctgtagtggatcgtatatctctcggaagatgggattccccggtgatcgtgaaacgagtagagcagcgatgatcgccggcgacaaccggcttcgaactgattggtatttgtatttacagtcagagttccactcgaagctggaattttgcgtaaaagccctgcgctcgtcgctcggaaatggttttcgtttgaatcgatgcaaagagagtaaacattcaaaagagattgttgagcaatttaaatttggattgtcttaggggatttttcttattgtgttcacagatttttttttctctattttcaatcggtgaataattcatgtgaaatgctttgaagtttgtttttcatctgtaataagcacggtgtttatttaaccacccctattaattactccacctcatacctaaacttggtgaacaaattatgctggagggattagtcaagaaaactcgctatactttttgttatgattaaggaaatcaatataaatgggaagttgtgtaactaaaattacacaatttggtacttatcatacattttaatgtttctcaaccttttttcaacagtttgcatcgtagcatcatgcacatgtacggatgataatttcgtcaacaatgatgatcagccatttcgaggacagcgtaatgtggaattcgactggaaactaactaagcaagtgttccaatctcaaaaatccaacgcagtgatatcgcctctctcggtgaaaattttgttggtgctactgtacgaagccaccggagatgctgccgaactttccgaaacacaaaccaaacgcgagttgcgaacagttctggaaccaaacggtgatctgaatgcaacccgcagcaagtatcgccaatggctggattcggcactgtcttcccacaaggactacgatttggaaattgccaccaagttcttcgtcgaggaatacattgacgtcatttccaaatatcagatcatttcggatcattactacagcgccacggttgacaaagctcctttctcgaaaccgaaaatcgccgcggaacagatcaacagctgggtgaacaaaactacacatgggcgcattgcggagcttgttacagctgatggattggatggagcgatcatcacgttgatcaacgccatctacttcaagggactgtggacttatccattcccagagtatacaccaacactgacgttctatggcaatcagaaacaagtgcaggcaccgttcatggagcaaaacggccaattctattatgatgattcggccgcattggattctcaactgttgcgattgtcatatcgcggaggaaagtttgccatgtatttcattctgccccaccaaggaaagactgtcgatgatgttctggataaaatgactctcagcacattgcatcaagcgctttggtacatggatgaaaccgaagtgaatgttaccattcccaagttcaaatttgacttttcagaagaattgaaccaaccactgaaggatattggaattcgtgaaattttctcccaaaatgcctccctgccattgttggcccgcggaaagggcgcccgaaatgaagttcgtgtatcacgagtgttccaaaaggcaggaattaacatcaatcatctaggaagtgaagcatatgcggccactgaaatccaactagttaacaaattcggaggagatggaacgcaaattttcaatgccaaccggccattcttgttctttattgaagatgaagactttggaacgttgctgtttgctggcagagtggaagatcctacccaatgaaaaggggtctgtgaaggaatagtacaacgcaacatcgcatttgacttccataaatattaaaaaggctcaaataaagctgattatttttaaagtgaagacttctatttcattttttttattctgagttgcttaattgaaatttcttttattgaatcgcttactaccaaaaacacaaaatcgttctcaaaagccactatgctcaagtgaaaccacactttctctcctcatactatttttgttgcagatcatgagtgagagcaagaatgcattagatgcacttggatgcccaacgacatttatctacattatttacactcaataaactaagacattatatgtttagatcaagcattacccttctttgcattgatcaaagaggtaaatgagttgtgaacaaaaactaatcgggtggaaaagagcatatggtaaatgcttcgcaatggtcaggccgtagctttcccaggctgtgtaataaatttattactcgaaccactcattcatccaacttgcactttggataatggtggaaagtagggcaggaataattttcatgttcgatgcaggaaaaaatgggtgcagcgaaatgaacttggtgtgcaaaatgcacctgataagtactggggataggcgaaacgattgagatatgcaaaattttgctcaaattcgaatgcttatgactttttgaaaaatgcatgaaattggatgcatctggaagcattagatggcaaatttggtctagttttatgaattcacttggtcatgcatattgtctactgaacaccggagttg

SEQ ID NO: 486 - DNA, 1759 bp, Aedes aegypti
agttgactgcggttcgttagttagtcaagtcgaaactataccggtacgcttcggaggggtgtgtttttgtgctagtcgtagttgtgttttgcgatcgtattgcgatcactatctcgcgtaagcccgcgtggttcgacgcgacgcactctgtacttagttcggttcccataatgcattactgcacgcatgtaattgttttcccgtgagcaacaacctagacgaaatttacacgagagtagagattcatcgttgttctgctacgtcatcactctctgcagcggacacgacaagagatacacaaatcttggataattgagttcccggttggcaagaccttcaacatgcctgctcaatgccctcgatttgggctaagcgcggtgcatatgggggtggcacttctatttttattgactacctctgcaacccttagaaatgttggaaatcatcgatcgaaccagctacaaaatcaacccgacgcagttcttttaaacaatgatcttgattggaaactcgtcaaggaagtgttccatcatgaacagaaaaacgtaattttttctccgttctccatcaaattgttgctttccctgctgtacgaagcatcaaaagaacacagcaaaacccgacaggaactatcactcgttctggctggctcagacctggaaaagaatcgactattgtatcaggaattcctggaaagttccacgaaagaaaacagcaactatcagttcaacgttggaacacggatttttactgatcaaagggcggccaacgtttcagatgcttattccgatttggtgcagaattgctacaaaactagtatagagtctgtggagtttgacagtcccaaagagactgctaacaagatcaacgaatggtgctttaacattactaatggacacttgaaagatctagtagatgaagagctcatcaaggactcagtaatggtgatagtgaacgctctgttcctgaaagcttcgtggagaaattcgttcaaagaagagctcaacagaaagcggaatttctacgtgtcggaaaacaccaccgttgaagcagagtttatggagcagactgacatctaccaatatctcgacgatcctgatatgcagcttgaaatggttcgattaccttataagggtcgccacttttcgatgaccatagttctgccctacgcaaaccggtcattggggaaaatggtcgagtccctcacagaccaaaacctgctgaaacttgaatcgaacctacaacgggacgaaattgtagtcattattcccaaatataaattcgactacagcacaacgctcaatgatgtgctgataaggctgggaataactgaagtattcaccgataaagctgagttaccggaactctccggaggcaagaactcaacattggcagtgtcaaaaatgcttcaaaaggctggcattgaagtcaacgaaaaaggaactctagctttcgcagccacagaaattcaactggtaaacaaattcggcatagacgatatgcctattcagtttaaagcgaaccgacccttcatgttctacatcaaagacgaagattcggatgctgtgctctttgttggaaaagtagagaatcccgtggcgacggaaaaactaccgtagactaaaccgtgaggagaaactgaacgctctgtgttaccaaatgaatgacgtttttttaattgtagctttaattttgtgtctagcctagatctgtatacgaatgcaaaacggaatgacgataataaaatactcagagtgtg

SEQ ID NO: 487 - DNA, 3146 bp, Aedes aegypti
cagagtactagaggttttactgtcgacaacagcgatatgccccagtgcgtgctgtagggtgtcccataaagtatgaatataagtttaacatggtgccataccgaaaaaatgtcatgaactgattgaatgctgttgacgaatataggaaacttctaaacataaaggtgtgacaattaactaactgttttttttttcaataaaatgaaaatgcagttaaagcaaatcagttaaataaaaataagattgaatctgatagttaaaaaggtcattttcaaacaaaaacaaatacttatcattcaaatttagatccttaagactgaatctgaatttagatccttaagaaaggatctgaatttgaatgacaaatgtcagttttgtgatgttcatgctcattagtagaaattcattacaaaaccaatttaaaatggcaacataatccttaaagatcgataccgaaattttatatcgtcgaacgtggattcttttgatttttttgacattcttcaacagtgaaatattgtaactctaagagttgtaaataaatattgggttcattttcatatattaaaatagtatgtttgcttcaattgtcatccttcattgaaaagcaaagcttttgtgtttgatcttctaaccaagccaagccatcagctgcttagatatttttatctaagattttttacaatttatctatgaaccagtgacaaaaatgatgtatttcaataaattcaagtaaaagatatggaataataattacggaagtgtacacaagtatgtaaataaatacttgaaaatagtatttgtgctatagaattctagagtaagtcaccaaatatttaatggtctaatttgtcactaatatttgaacaccccataatcacgggtaattgaatatttgatgagaaattagactgttacatatttagcggcttacccttattgattcaaaataatgtttttcttagcaaattacgattctgattgatgaccacaaacttgggaaaatctcttgagttaaatataaactatggctcaagttgtaaaaaaaaagtatgagtaacagacttcaagaacactaacgaacaagtcttcgctaatttattgctgcactgtattgcaaacgtgaattgatttaccaacggatctcatacggaagtcaattaatattttaccgaaccgaatttgctcaagcgtagcatttacggccgctcgatcatgaccttgtttgtaattgtcttttattagcgaaggaaatgttatgtacttcttcaatcaattgttgattgcaatcataggtgctaacgcgtgacgtagttaagaagattccaagctcttaaaaactaaacaaattgcaatgttttcctagcaaatgcgcttcgtttcacttaaatatgccatatatgaatgaactgcgtttcactatttttcattgcaatgaaaactctactaatccaagtttaacggttttttttacagccgtgtccttccggaggttcaaccgggatacctcaagccccttatcccgtcggaggccccggagaaaccggaaagctgggaagccgtgatggccgacatcgagcgtgtcatcatgcctggtgtcacccactggcacagccccaagttccacgcgtacttcccaacggccaactcctatccagcgatcgtggccgatatgcttagtggtgcgattgcctgcatcggattcacatggattgctagccccgcgtgtaccgagctggaagtcgagatgctcaattggttgggtaaaatgcttggactgccagaggagttcctagcaagctcgggaggtcaggcaggaggtgtcattcagggaaccgctagtgaggctactcttgtggcgttgctcggtgctaaagctaaggctatcaagcgtacccaggaagaacaccccgagtgggatgaaacctacatcatttcgcgattggttggatacacatctaatcaatctcactcatctgtagaacgagcaggtttgcttggaggagttaaactgcgttctctcaaggccgacagtaacctgcaactccgtggggaaactctagaagaagccatcaaacaagatttggccgatggactgatcccgttctatgccgtgtgtaccctcggaacgactaacacgtgtgctttcgatcgattggatgaactgggtccagttggtaacaaatacaacgtatggatccacgtggatgctgcctatgccggatcggcctttgtctgtccagaatatcgtcatctgatgaagggaatcgaaactgctgattcgttcaactttaacccacacaagtggatgctggttaacttcgactgcagtgctatgtggctgaaggaaccgtactggatcgtcaacgctttcaacgtagatccattgtacctgaagcacgacatgcaaggatcggctccagactaccgtcactggcaaatcccattgggcagacgcttccgtgctctgaagttgtggttcgtgctgcgtttgtacggtgttgagaacatccaagctcacattcgtcgtcattgcgcttttgctaagcaatttgaggctctttgtgttgcagacagccgttttgaaatcttctcaaccgttcagatgggtttggtgtgcttcagattgaagggaaacaacgaaataagcgaagctctgctcaagaagatcaacggacgaggaaagatccatatggtgccgtcaaaggttaacgatgtctacttcttgcgtatggcagtatgttctcgattcaccgaagcctcggatatcgagtactcctggaacgaagtctctgccgtcgctgatgaactgttggccgaaaagaaataaactggcgtttcacaatgttcctgatggcacaacgtgtccaactgtattactcactcactcaatctctctaattattctgaatggtatagaactgctatgatagcttaatcttccatgtattgtccaaatgcaacacttggagtaaactaaaaggaccataaaaaaacaatcacgcaaaataataatatatttgtgaatattgaaaagttgttgtagtggatagtattgctgccgctagattttaaaatgtcccttgatgttaaattattgttggagtatgagaataaataaattgtaatttattgtgttttaataa

SEQ ID NO: 488 - DNA, 926 bp, Aedes aegypti
ccaatcaactagaatgaaaataattatttcattactttgtgttatctgtttcatgcttgtaacgaatttatgttccccaattgttgacgaggatgattcttcctcgtttggatcaccatgcttacagccaccaatgaaatttaagaaacgttattttgtgcataactacaatcacctaacgttcttggaagcctggaggcagtgccatgccattggtcatcgcttagctactattacatctgaggaggatagccaactcttacaggaaaccatagtgaactctacaaacacgaaaggtccttggtatatcggtggcaccgatttgggaaatgaaggacactttatatggatatctaccaacacgcctgttggacacaagacaggatacttcaacttctcacccggacaacctgacaatgctggcgcaaatgaacactgtcttgagatcggtcgttggggtggtgtagaatggaatgatgtacattgtcatgcgaaatcacgctacatttgtgaatctgtcagtccaatctggtcgtagaaatttattactcaatgacaataataaatcatttgtttgtttattagttcaacctttcacaaacgaatttcaatcttttagtgcaaaccgaatcattccattgcatagtatccgcgcgaagttctacgcagtgctcagtttccccacgcataactgctgcgttcggttcaccggaggcccactttttgtaggttatctctttattggttaggccccagcggaagattcctggtttggctaaatcgttgccaccgatccaatacctttccgatggttcatctccattgtcccgaagccattcctccaagtcttgattgtcgtaccggtcacgaatttgtgcgagcgtcattcccattccattgcagtaggaaatggcctcgaaccacgt

SEQ ID NO: 489 - DNA, 717 bp, Aedes aegypti
gtacttttcagtgctactaaaccaacggcatcatccaacgatgagggttcctgccattcctttgccggaggccatgtctacccccaggaagacgtccgatcggcggaccataagctccagtggaccaaagccgtgatatcccgtccggctccgaatttcgaagcgaccgccgtggtggagggagccttcaagaagatcaagctgtccgactaccggggcaagtatctggtgttcttcttctacccgctggactttaccttcgtgtgccccacggaaatccttgccttctcggaccgggtcaaggagttcaagaagctgaacgccgaagtcattgccgccagcatcgattcgcacttcacccatctggcgtggatcaataccccgcggaaggaaggcggtctgggcaagatcaacattccactggtgagcgacattacgcacagcatcgccaaggactacggagtgtacctggatgacctgggtcatacgctgagaggactcttcatcatcgatgaccgcggcattttgcgacagattaccatgaatgacctgcccgttggacgttcggttgacgaaacccttcgattggtgcaagctttccagtatacggacaagcacggagaggtgtgtccagccggatggaaacctggccaggatacgattgtgccaaacccggaggaaaagatgaagtacttcgagaagaaccataaatactag

SEQ ID NO: 490 - DNA, 3060 bp, Aedes aegypti
gttgtttgagaatgcgtattcggggtaaatatcccaacattggaccaatccggtgcactgaccccaagcagacagcatttgtaattcgctaattggcgtgttaacaacgaaccgttatttttgtaacaaaaaacttaataaatctcacaattcgctgaccacgctgtttgctgctgtttcagctaataatatatttatgcgctattggaggggttaatccttccccaaatttccacagagagttccaggatgttggttgagtaaccaatcactaaagacaaatcaatcaccttacttaacaagacgctgctgacgactaccgaaggttatcaacgaatttaattatgtttgaaattggtggtttgggtcattttctggtgagcttatgccttggtgtatttgtgactaagtagagtagacattccgatactaattgtgttaagcatgtttaatgttctagtgtttgtttgttttcaccacgtaatgaactaacctgcatgtcactttttatttaaactagaaatatggttgaacatgaactctaacgtattttttacaactgtgcaacagcttttctggcgagaagaccatcactaaaaaggttcccgacacgataacttcctggatgatcactggtttctcggtgagcccagtttacggattgggtcttacccgtcagccaaggaaactgaacgtcttcctaccgttcttcgtatccaccaatctgccatactccgtgaaacggggagaggtggtgtcgattccgattgtggtcttcaactacatggactcagatcaaacggctgaggtaaccttccacaacaccgaacaggagtttgagtttgccgacgtggagaacgaggttcatgaaaatccaaagctcgaactgttccgcaagaaaaccgttcaagttgcatccaatacaggaaaaactatccccttcatgatcaaaccatccaagttgggtcatattaccatcaaggttacagccactactcagctggccggagatggtgttgagcgccaattgctcgttgaaccggaaggtctgccccagtacgtcaataaggcttcgttcgttgatctgcgtgccactccagaggtcaacaacaactttactgtcgagattcccaagaatgccgttccagactcgacacgtgtagagatcgctgttatcggtgacgtactgggctcgactattcaaaatctggactcgttgatccgtatgccgtacggatgtggcgaacagaacatgttgaacttcgtaccaaacatcgttgtgttggactacttgaagaataccaatcagcttacggcaagcatcgaggataaggcaaagaagtacatggaatctggatatcagcgcgagttgacgtatatgcatgatgacggatcgttcagtgctttcggcaagtctgatcccaagggcagtacttggttgactgcgtttgttgctcgctcgttcaaacaagccgccgatcatatcagcgttgatgagaaaatcatcgataaatctttggagtggttaagcgatcaacagtcgtctaacggaagcttcccggaggttggtaaagtttcgcacacggatatgcaaggcggatctggacagggaatcgctttaaccgcctacacgttgattgctttcctcgagaacaagaacctgatccccaagtacaccaatgtcatcaacaaagcgttggactatatcgtaaggaacacagaaggattagacgataactacgctctggctattgcagcgtacgcccttcagttggccgatcatagtgccaaggatttcactctctcccagttggatactaaagctactaccgatgaggatcaaaagtggtggaacaagcccatcccagaagccgacaagaagaatccgtggtacagcaaacccaactccgtcaacgttgaaatgtccgcttacggaatgctcgccttcatggaagctggactggatagcgatgccctgccaatcatgaagtggttgatctcgcagcgtaacgacaagggtggattccagtctactcaggacactgtcgtcggtttgcaagcgctggccaaactagcggcaaagatttcttccaagaacaatgacgttaccatcgtggttacttacaacgaaaatcaacagaaggaaatgaagatcaactcggagaataacatgatcttgcaaaagttcgagctcccgtcgtcggcgaaggacatcgacatcaaggctacaggacgaggattcgccgtcgtgtcgttgggttacaaatacaatatgaacgtcaccggagagtggccccgattcgtgctggaccctcaggtgaacaaaaactccaatcaggattatttgcatctgactgtgtgcacaaactttgttccaaccgccggacaaaacaagtccaacatggccgtcatggaggtaggcttcccaagtggtttcaccgccgattcggatactctgccctcgttggagaataccgagtatattaagaaagtggagttgaaggacggagacaccgttgttgtaatgtacttcgacagtctggaccgtaacgaactgtgccctacggtttccgccttccgcacgcataaggtcgccaagcagaagcccgctcctgtagtcatttatgactattacgataactctcgcatcgctcgtcaattctacaatggaccggcagctggattatgcgacatctgtgaaaatgaagattgcggtaattcgtgctcgattaaatcgcagaagcagcgatcacctaaggaggaagccaccgtgatggccaaaagcggtgccgttggaattacgatcggtttgcagctaattgttgctgcactgctggtgaggttgttcaattgaaggggttccgtgaacaacgttaagtgacaggggaaactgagagagagaaagacgaacttgcaataatcttgctagagcggaagtagacaactgcgatgatagctttatgtacctagtagaagattattgtgatttgagtggtatgatttttggataaacttatgtaactgtaaaatttgatcacaatatagataatgtaaacagaa

SEQ ID NO: 491 - DNA, 1181 bp, Aedes aegypti; identical to SEQ ID NO: 56

SEQ ID NO: 492 - DNA, 1224 bp, Aedes aegypti
atgccgtcagggagtgtccaccggacagcgaggattacgaggaccaccatcgacagcgccgtcaactcgtctgacattgcctcgctagcgaattcgattccgtcgcggcaacgaagacggtcctgctgtccagtccagcaatgccggcaatggttaccgatggcactgagagcgactggagtggggaccgtattgctgctgctggtggtgctacaactcctagcaccggtcacgggtcaatccaatccaccgcaaacatgtcctcaagcgggcgaaatcagcccgtgtcagtgtcaggtgaagaagaatggtctggacattctgtgcgaagcgaccgacgttcagcacattaccagggcgatgagcgcgttgaaggggaagaatcccattatcttctatctgaagctacgacataacaatctgcctaaactgcagggatttgtgttcctctcgctcgacattcgacatctcacgattcacaacagcagtttggccgccatcgaggagacttcgttaagctcgttgggtcgtggtttgactcagctggatgtttcccagaaccagctgttgacggtcccctcgagcgcactgaagaatctgcaccacttgctgatactgaacctgaatcacaatcgaatttcggttatccacaaccgggcgttcgagggtctggacacgttggagattttgaccatctacgagaacaagctgacgtccatcgaaccggatgccttccgagggttagacaaaaagctgaaacgtctgaatctcggtggcaacgatctaacctccgtcccgcaaaaagccctctccaagttggacatgctgcgaaagttggaactccaggaaaatcgtcttaaaaccataaaagagggtgactttgaaggtctttccaatctggatgccctaatcctggcccacaaccagctcaccgaggtaccggcacgcgtcttcagccatttgattctgcttaactcgctggagttggagggaaattccatctcctacatcgataaggatgccttcgagggactggaagaaaatctccagtaccttcgtctcggcgataacaatctgcaccgcattccgagcgaagctcttcgaccgttgcatcgtttgcggcatctagatcttcgttccaacaacatctcctccataaacgaagatgctttcgtcggattcggtgattcgattacgttcctgaatctgcagaaaaatgagtaa

SEQ ID NO: 493 - DNA, 1727 bp, Aedes aegypti
tcaattgaacgataactcacaaacccgtaatcatcaactcagataatgatcaagaacccatttgggcagtttgtgcaagtgagctaaacagatgattcatggtactcagtaaataatggaaatgatttcgatatcaccatatagcgtgaatagcaatcctttctaatagttgccactagttttaacattcagttttaaagtcatgttcagtagcataacattttgtagcagaattgaaattttatgagcataatttacaattcataattgcaatcctgttagccaatttgagtgacttaaaactcaatggctgtgtatgatcaatcttgtgtagcaaatttagagtcattagattacaaacaatattgatacaaacttatgatttttttcatcaatatttttatcagaattttatcagggccttgaggtcactcaccgcttcaaaattgaactactatccagagaagaaagttaagttttatattcaagtgacaaagtgacagaaaactaagtgtattcaatagttgttttaaataagtgtgttaataagtgtccaaaatccaaatgcctgccatcacgaaccagatgactccaattcgtcacgttctggatttgtccaaggaggagaaacgacagtttttagattcgttcgacaccatcatgtcggactgtgatggtgttgtgtgggactttatcggccccattcccggcgttgacaaagccctaccgctgcttaagaagaagggcaagaagctcgccttcatctccaacaatggaatgcgcaccatggaggagtacaagcagaaattcctcaagttggggattccatcacatgagctggacattgtccatccggctctgaccacagtacgttatctgaaagcgatcaacatgacggatgcggtctattgcgttgctaccgaggtgttcaaagactatctccgaaacgagcagtacacggtcctagatgggcctgacgatcgtttcgctgacgaaagagcggccgattcggttcgcgtgttcacggatttcttcacggaatcggacagcccccgggttggtgcggtcgttttggatattgacgtgaacatctcgctggcgcatttgatgaaagtcaagtgctatctggaacggaatccggactgcatcctgattgcgggtgccaccgactatatcgttcccctgggcgatcgaatggacgtgatcggaccgggctacttcatcgacatcctggaacgggccactggccgtgaagcgttgattctcggcaaaccgggtcaagctttggccgactttgttctggaacagttcaacgtaaagcgacccaagcgagtgctgttcatcggtgacatgctgccgcaggacatgggcttcgcatcgttatgcgggttccagaagctcctgatgctcagcggaggcaccaccctggacatggtccgggcgcaaaaggtgcctgcacagctgcccgacttttacatgaacagcttcgccgattttatccagctgtacaaggatgtacaataatggttaaacgatttctattagttttgaatgaatctattccacgttgcagctggattgcaacttcacttcttcgggagtgttagtgcgcaccgcctagtaagtgttactgtgtaaccactggcctatgactttgcatattttgtaagggtgtacacatcgatgtgatatttttacaataaaatgtgatatgattgtaagtgtaa

SEQ ID NO: 494 - DNA, 474 bp, Aedes aegypti
attccgagcccagtattttcatcaaaaaccatgaagccagaccaaaaatgcatcctacggttcgccaagctcacggatcaagccttcccaccgtccaaaggatccgtcaaggccgccggatttgatctcaaaagtgcgtacgagtacacggttcctgcccggggcaagcagttggtgatgaccgacatccaggtgcaacttccggaagggtgctacggccgagttgctccccgatccggactggccgtcaaaaacttcatcgatgtgggcgccggagttgtggacgaggactaccggggcaacctgggtgtggtcctattcaaccactcggacaacgagttcaaggtggcccggggggatcgcattgcgcagttcatctgcgagcgaatcttctatccggaactggaggaggtcagcagcctgacggaaacggaacggggcagcggcgggttcggatccaccggaacgcaatga

SEQ ID NO: 495 - DNA, 3113 bp, Aedes aegypti
atataggatacctcgcagcttctgttcagtgcgacattatgcaacctgcgcgactcgaatgaaggacgactgagactgactgactggttgcgggtgaagaacgtggcggcgcttgaggcaataaaaatagcacgctttcttcgtcatcgtttgtttgtctgtcgacgacgactccgaaaacgtcaccggtgactggttcactgatctcctcgccgtcggctcaaaaagcgtttatcagggtggaattccagcaactgaagtggtatcacgcatcgcgagatatcatcatcttggcgcgcattttgtgagcaaacaagagaaggaagcgcccgcagtctttgatccagtttgctgcggaaagctgtgatattgctgtgtgctttatgtcaaaagaaaaatattacaaaatgggttcgacgcaacgaagcaagctgattgcagtcatcgatgaaggaacgaacagcgcgcgctttgcgatcttcaagctgccccagttcgaggagctatgctcgcaccaggtcagcatcacccagatcatcccgcacgagggctggtccgagcagaaccccgtcgaactgctggaagccgtgcggttgtgtgccgtcgaagcatgccacaaactggaaaccctcggttatctggtgagcgatatcgcctccatcggtatcactaatcagcgcgagacgaccgttgcgtgggacaaatatactggcgatccgctctacaatgcaatcgtttggaacgacatccgcacaaactccacggtggacaaagtgttggcccgaatcccggaccagaatcacaaccacttccggcagatttccggtctgcccatctcgccatacttctccgccctgaagctctgttggttgaaggagaatgtcccggccgtgcggagggcctgtcgggagaagcgttgctacgccggaaccatcgacacctggttgatttggaacctaaccggcgccgccaacgggggtgtattcgtaacggatgtcaccaacgcctcgcgaacgctcctcatgaacatcgagacgctcttctgggatccgatactgatcaagacgttcaacctgcacgtggacatgctgccggaaattcgcagctcgtcggagatctacggccacatcaagtatgggagcatcctggacgggatcccggtgagtgccatcctcggcaaccagcaggccagtttgatagggcagcggtgcattcgggagggtcaggcgaagaacacctaccggaaggggtgcttcctgctgtataacaccggaaccaggtgcgtacattccacacacggactggtgacgacgctagcgtacaagatgggacaggacaagccggcggtttacgcgctggaagggtcgattgctgtcgccggcgtggccatgaagtggcttcgtgataacctcgggctgctgaaggacattccagtcgattcggagcagattgccggcagcgtgttctcaaccggcgatgtctactttgtacctgccttcacgggcctgttcgcgccctactggaggaaagatgctcgaggaataatttgcggtctgaccagtttcaccaccaagcatcacatcattcgggccgcgctggaagccgtctgcttccagacacgtgatattatcgaagcaatgaagaaagactgcgggatcaacctgaccaaactgcacgcggacggtgtcatgaccaacaacacactactgatgcaacttcaggccgatctcgttgggataccagtcttgaaaacggaagtgagcgatcctgcgacactcggaacggcgatggcggcagcgcaggccaagggaatcgaactctacaacatggataacgataatcgtgactacactctccacatcacccacgaaacattcctgcccacaacgacggaggaggaacgcaacgcccggtacaccaagtggaaaatggccgtccagcgcagcttgggctgggccgtcaccaagaagagtgatgccatgacagacgaacgctactccatgctggcgtcgattccggccggactgttcctgttgagttcgttcgtgatgctggtggtctcgcaagccaaacgaagctgagctacctaacctaaaaaaccgaacgcttctggggccgtctgttcagttgcaagtcttattctaaaattgcatatacttacaacttattattagctagattagacggttgtagtcggaacccaagcttacaactaaaaagacaactcaaactctggggggtgctcaagtatccaataaggtagatagttagcgccggaaaggcgctataatgcaactttaaggttaggagacccagattaggacaaacgaatagcaaaccaaaaaaaacaaatcagtgatgcttccatgcagcaaacagtatagatagttaggcaaactaatccgagtgcactacgcaattgggcctcagtcgattgcaacccaagtgtcaaagagtacctttcaatagttaacggaactaggaaaaaaaaagtaagcactccattcctcgtagtacacgaaagcttagaaaacaaattgaaaataggtctgtagtagaagaacaaaggggaagattgtaacaatctaaaaattatataataatcaattagacatatgtgaggaacaaaagtaaagcaaaagatgtaagttattttacacgaattgttaggatccctccgttacaaagagacacatttgatttagtcgtttgaatgatgatattttaacgtgtttaggcataacttttagcgatcgatttattgatttgtcagactattattaaaaagattctatcctctagatgttaagcatattgagggcttgattttactgttgtcaaccgcaggtagtttatttatagcgcctaatttgattgtattgtgaacacagagtagctttacttttactaagtagccatctaacgaggaaacgacgattgtaagacttttttatatacagtacttaatgctacagaacgaaagattttattatacacacattattttgccgatggatcaaaacgtagtagatatttatccgaaaacaagtccctgatagtataggtaataaaatatgtatttcaattgcacttaataaaaattactagatagg

SEQ ID NO: 496 - DNA, 1179 bp, Aedes aegypti
gccctctcactgaccactaaacgacgtgcgttatatcctcggggcatatacgtgcaagagaggaaccgtgttttgcactaaggtcatctggaggttgttgaagttctccacaaaagtgcaaaccgtcgcaccggtaggaagcaaatcctcgttcatcttttcgccgtctagtcaatccaatcttcaaacaaaatgggccgcaaattctgcgtcggaggaaactggaagatgaatggtgataaggccagcatcaccgatctgtgcaagaccttgaccactggaccgctgagtgccgacaccgaggtcatcgtcggatgcccagccccctatctgaccttggctcgctcccagctgccggacagcgttggagtcgccgcccagaactgctacaaggtggccaagggtgccttcaccggtgaaatttcgccggccatgctgaaggacttgaacattggctgggtcatcctgggacattcggagcgtcgtgccattttcggtgaatcggacgaactggtggccgataaggtcgcgcacgctttggccgaaggtctgaaggtcatcgcttgtatcggcgaaacgctgcaggaacgtgaagccggtcaaaccgaggccgtgtgcttccgccagaccaaggccatcgccgataaggtcaaggactggagcaacgttgtgattgcttacgaaccggtctgggctattggtaccggtaagactgccaccccggaacaggcccaggaagtgcacgctgccctgaggaagtggttcaccgagaatgtgtccgccgatgtttctggagcaatccgaatccagtacggaggatcggtcactgctgccaactgtcgtgaattggccgccaagcccgacatcgatggtttcctggttggtggtgcttcgttgaagccggagttcattcagatcgttaatgctaggcagtaagtggaggcggtaatccaaacgatttgaactctgcaaaaggtgaatcttattactcaccgccatttctcactctctcgaggcatttcgaaagttcggtgcgttcgagcctcaaacaggaatgaataatttaaaagtataggcgaattattatgtaagttcataaactgcaacgagtgttatcactgattactagaacataaaaaaaaacaaacaaatacaaaaaatatggttcagcaaatagtg

SEQ ID NO: 497 - DNA, 732 bp, Aedes aegypti
atggtcaagaatcttctcaattccggccactcggtcgtggtttggaaccggacggccaccaagtgtcggaagttccaggaagcgggcgccgaagtcgccgacaccccgtcggacgtgatcgaaatgaccgatgtgacgctctcgtgcgtttccgatccccaggttgccaaagagttggtattcggaaattgtggcgtcatgtcggccaatctggttggcaaaggctacgttgagatgaccggcaaccaagcggaggaaggaacgttaataattctggccgccggcgaacggttgctgtccgaggaatgccagacctgcttcgaggccatctcgcgcaactcgttctacatgggcgacgtgggcaatgccaccaagatgaatctggtcctgcagatgatctccggcgtgatgctggtcggtattgccgaggggctggcgctggccgatcgagcgggtcttcaacagaaggatgtcctggaagtgctggaactgacaagcatgtcgtcagagctggtcatgcagaagggaaatgcaatcatcaagggcgaattcccgccccagcaggaactgaagcacatgcagaaggacctcaagctggcgctgaatatggccgaaggtctggagcaccccctgcccatcacggccgcctccaacgaggtgtacaagcacgcgaaacgcctcggctacggttcccacgattccagcgcagtttacgtacgggcaaggttttaa

SEQ ID NO: 498 - DNA, 2109 bp, Aedes aegypti
tgaaaatcaaaagtgataattactataaacgtgaaattagttagttccgattcgtgctgaatacaaaaccaatattgtagcataagcaaaaaaatcaaaataaccaaaaaaaatattaaaaaagttataaaacaaattaaaaatattacaaaataactggtaaaaatgcctcaagtcattgaacaattcaccaagctgccaaccgcttttggctgctctcccaaacttcgttccgtagcggacaaccaaatccgtggcatcaccatcgtcaacggacatgtggcccagctctcatccaaaatccgtacctacgttgaggagtctgttgccatgtgccaaccggatcgcatccatatcgtcgacggaagcgagcaggaaagtgctaccctgattaatactcttcacgctctcggaacggtacagccgctgcccaagtatgagaactgctggctggcccgcaccaacccagccgatgttgcccgtgtcgaatccaagaccttcatatgtactcagcgacgtgagcaagccatcccaactccgaaggatggcgtccaggggagcctcggtaactggatctcgcccgaagactacgagaaggcaatccgttctcgtttccccggttgcatgaagggacgtaccatgtacgtggttccattctccatgggaccgatagcttcgccgttgtccaagttcggcattgaactcaccgattcagcttacgtggtctgctcgatgcgtatcatgactcgcatgggtgttgaaatcctcgagaagctctcagataactccgactttatcaagtgtttgcactcggtgggcactccagccagcggaaagatcaccatgccatcatggccctgtgatccggaaagaaccatcattctacacaaaccagccaacaacgaaatcgtctcctacggatcgggctacggcggcaactcccttctcggtaagaaatgcttcgccctgcgtatcggaagcacgatcgctcaacgtgaaggatggctcgccgaacacatgttgatcctcggcatcaccgacccgaacggtgtcaaaaagtacattgccgctgctttcccgtctgcatgtggcaaaactaacctggccatgatgacgccaactcttcccgggtataccatggaatgcgtcggtgatgacattgcctggatgaagtttgactccaagggacaactacgtgccatcaacccggaaaatggtttcttcggagtcgctccgggaacctcctcggaaaccaacccgaacgctatggaaaccgtttacaagaacacgatcttcaccaacgtcgccgccacatccgacggcggagtgttctgggaaggaatggaaaaggaaatcgatcctgaagtcgagatcaccgactggctgtgccagccgtggaagatgggtgtatcaaagacaccagctgcccacccgaactctcgcttctgcgccccggcaagtcagtgcccaatcattgaccccgcctgggaagacaacgagggagttcctatttcggccattcttttcggaggacgtcgtcccgaaggtgttccactagtgtacgaagcgaactcatggtcccacggagtattcattggatctgccatgcgcagtgaaaccacagccgccgccgaacacaaaggaaaaatgatcatgaatgacccattcgcgatgcgtccattcttcggttacaacttcggcgactatctgaaacactggctcagcatggaaaaccgttgtgctgaagccggtggacacatgcccaagatcttccacgttaactggttccgcaaggatgccaatggcaaattcctgtggccaggatttggcgagaacagccgagtgctggattgggtcctgcgacgaatcgacggcgaagaatgctaccaacagacccccatcggacgcatcccaacgcccggtgccataaacatggaaggcctcggccaacgggtcgacgagaagcagctcttttcgataccgaagaaattctggcaaaatgaggtagaagaaatcaaacagtactacgataaccaactgcctcacgatctgccggaggagattggaaaacagtggcaggaactgaagagccgcgtggaagacatgtaa

SEQ ID NO: 499 - DNA, 651 bp, Aedes aegypti
caggttgctaaggagttggtattcggaaattgtggcgtcatgtcggccaatctggtcggcaaaggctacgttgagatgaccggcgtcgatcccgaaacgtcacatgacattgcagagcaaattatcgccaaaggaggacattctgaagcacaaattcagagatccaagaaccaagcggaggaaggaattcttctggccgccggcgaacggttgctgttcgaggaatgccagacctgcttcgaggccatctcgcgcaactcgttctacatgggcgacgtgggcaatgccaccaagatgaatctggtcctgcagatgatctccggcgtgatgctggccggtattgccgagaggctggcgctggccgatcgagagggtcttcaacagaaagatgtcctagaagtgctggaactgacaagcatgtcgtcagagctggtcatgcagaagggaaatgcaatcatcaagggcgaattcccgccccagcaggaactgaagcacatgcagaaggacctcaagctggaactgaacatgaccgaaggtctggagcatcccctgcccatcacggccgcctccaacgaggtgtacaagcacgcgaaacgcctcagctacggttcccacgattccagcgcagttaacgtgcgggcaaggttttaa

SEQ ID NO: 500 - DNA, 1228 bp, Aedes aegypti
agcttgataaaaattctacggcaagaagttgcgttcgtggtcggtgtgaattttaaattcgaatatttccctgtcaaacattgccggtccggttgcaatttggtgtaaaacaactgttcgacgctccggttttcgtaattagtcaaaagaaaataggaaacaatggccgatgaaagtcttctgaacgactccaacttgggagctctgggatccaacgatgatgattcggagttgattttggaggaggactatttgaaaggcgctgatatgcaaatcgatccggaactggaagcgatcaaggctcgtgtcaaagagatggaggaagaggccgagaagttgaaacaacttcaaaccgaagttaccaaacagatgacgcttgggtcccccaccggagtcactccgattctgacggcagaagaaaaagccgaaattgataaccgttccatctacgtgggtaatgtcgattacggagcaacggccgaagaactagaagcccacttccatggctgtggcaccatcaatagggtaaccattctgtgcaataaggccgacgggcatccgaagggtttcgcctacatagaattcggttcgaaggagttcgtcgaaacggcactggccatgaatgagaccctgttccgtgggcggcaaatcaaggtcaatccgaaacgtaccaaccgaccgggaatgtgcaccaccaatcggttcccccgcggctccgttcgcggccggggagcacgtatttcgagggcatgctgctacggaggacaccgaggatcacgaagacctgctcgtggatatcgaggaagggccacctattacgcaccgtattagggaacgcaagtcgacaagacacacgacccccgatattcgctgcagcacgcaaacaaactcacgtttagtttttagggcatccccatctagaggatgagaggacactgggaagcaccagtggcaactagggtaagtaaacagtattccctcctggcatttttcgaaatcggctatcccaaacgaagcgcactagttgttcatcgttctcctataaatactgatgggcccctcagagcttcagggagaacggagtgcatcccttctcaagtctatcatctttttattcacgatctcattgtttgtcacattttaccaaaaaaaaagactgactttatcaagtatttctgttgaaaatctggattttatattttacaatatatcgtcttcacagtatttc

SEQ ID NO: 501 - DNA, 3183 bp, Aedes aegypti
ctgctccccaccgcgcgcgacgacacatcgaaaatcataacaaccgaagtccgccattttttattatccctctgttcggtcgtttagcttttcattccgtaagcgcgtcgttcactgtgtggcttcttttcccagtttatcgccagggaaaaaacgcaaatttcggcacaaaaacgtagcggttccccgtgggaaccagccagaagtgaagattatccgatcgagcggagaaaggaagtgaaaattccgtgaagtggaaccgattgacagtgattggaagcaaaaaccggacacggcgaattttagcgcggctggatctcccggacggtgttttcttatcgaaagttttattttcgtagcggtcacttgagggcgtaggaattgccaacggcagcaaattgccaccactgggaagtgtttcgtcgtgttatcaaatcaggagaagcatcagctattttcatcaataacttttgggcggaaaatcaaggaagcgtcacccgggaaggaaaatgaccgatagcaaaggttatgctgttaacgatctggtctgggccaagatgaaaggcttctcgccctggccaggtcgtatctcggagcccccggcagagcttcgccgtattaccgtcaagaaaaacattcccgttcgatgcattttcttctttggttccaacaactatgcatggatcgaggaaacacaaatcaagccataccaggagttcaaagagaagctgctctcgtcgtgcaagtcggccggcttcaaggaggccgtccagcagatcgaagagttcatcgcctcgccggaaaacttccagcatctgttcgcctcggagcaggacaaccgccccgatccggacgtcgagttcaacaaactgcgcgaaggtggcaccgaaagcggcgaggaaacgaccgtcaacaacacgtccaccccggcagcgctggaatcggtcgaaacgacacccgtaacggccaagaaatccgccgccaaaaagaaagtacgtgcttcactgcccatcaagttgcatgtggataaggctgcttccacaaccaaagcccgcgcgataggcaacaaagcgaaagcggcagcggccctgaacgacacttcatcgcccaaacgcaaacggaaaatcctcaacgataccgccggcgatgtgtcctcacttgatctcgacactttctccccggtgcggcgcaatgtacctgtatcacatctgttgaaccgaccaacggttgcccgcccggcaacgccggaaatcgatatgaccagcgtgtcgaacgcgctccagtcgcgcaacattcaggcctcgaatctgaagttcggcttcctcggactcggcatcatgggctgcggcatggtcaagaatctactcaattccggccactcggtcgtggtttggaaccggacggccaccaagtgtcggaagttccaggaagcgggcgccgaagtcgccgacaccccgtcggacgtgatcgaaatgaccgatgtgacgttctcgtgcgttgccgatccccaggttgccaaagagttggtattcggaaattgtggcgtcatgtcggccaatctggtcggcaaaggctacgttgagatgaccggcgtcgatcccgaaacgtcacatgacattgcagagcaaattatcgccaagggaggacgatatctagaagcacaaattcagggatccaagaaccaagcggaagagggaacgttaataattctggccgccggcgaacggttgctgttcgaggaatgccagacctgcttcgaggccatctcgcgcaactcgttctacatgggcgacgtgggcaatgccaccaagatgaatctggtcctgcagatgatctccggcgtgatgctggccggtattgccgaagggctggcgctggccgatcgagcgggtcttcaacagaaggatgtcctggaagtgctggaactgacaagcatgtcgtcagagctggtcatgcagaagggaaatgcaatcatcaagggtgaattcccgccccagcaggcactgaagcacatgcagaaggacctcaagctggcgctgaacatggccgaaggtctggagcagcccctgcccatcacggccgcctccaacgaggtgtacaagcacgcgaaacgcctcggctacggttcccacgattccagcgcagtttacgtgcgggcaaggttttaacagcgactcggtctagcgctgaaaggaggagatgtgagcttgaagagttgaacggcgacgatgaagaaggaatgcatataacagcgtggggatggaccaagatggatggaataacgcatccctgttgggcacccccgaaatgttggggtgtgtagggacggcgtggacgtttgaaaaaaggttgaaggattatttttagtagctatttttttgttttcttttagtagcaaaaacgaatcccttttcaggaggtttaaacgtgactacgcaagtagatggtgaataagaagaaatctggtaatttatattttacctgtttaagcaataagactacaatttcggaaagtaaactgataaattctatggtaaaaaaacacatttcttttgatgtaaatgatttttgtgcacctcccatgcgaagaaaatagatcccgcactaaatagccagcagcagcacatttgactgtactatttccccaaaaaaaaagcaacacaaaaaccgtgggaattatgtgcaaacctcgatttccttgagtcaggaaggaaacaagtcgcctctattaaaaaaaactacttttgcctatattatagttttacattgtaagttttattaatgaaagaataagatgcacgaaaaaaaagaagagggtggattataattttctgtttcgtagttgatttattttataacgaaattaaagtggatcatttacaacagttcattaggggggataatccgaatcgaatccggttggggggttcgccattaagaggccggacgagaaaagtatctatagagaacgaacagaatatttgtcgtacgcccacttacgcactggaagaaaaaaaaaacgaacagatatattttatttttattgtttcctaagtttgactagcttttccaaatcatcaataccagacaagagcatagaaataaaaaacaaacaaatcataatggatttctattttcgtgaaacaagtggatcgtaaaataaatgaaaagtgtttaaaacaa

SEQ ID NO: 502 - DNA, 825 bp, Aedes aegypti
ctgaaattcgggttcctcggactcggcatggtcaagaatctactcaattccggccactcggtcgtggtttggaaccggacggccaccaagtgtcggaagttccaggaagtgggcgccgaagtcgccgacaccccgtcggacgtgatcgaaatggccgatgtgacgttctcgtgcgttgccgatccccaggttgccaaagagttggtattcggaaattgtggcgtcatgtcggccaatctggtcggcaaaggctacgttgagatgaccggcgtcgatcccgaaacgtcacatgacattgcagagcaaatcatctccaaaggaggacgatatctagaagcacaaattcagggatccaaaaaccaagcggaggaaggaacgttaataattctggccgccggcgaacgggtgctgttcgaggaatgccagatctgcttcgaggccatctcgcgcaactcgttctacatgggcgacgtgggcaatgccaccaagatgaatctggtcctgcagatgatctccggcgtgatgctggccggtattgccgaggggctggcgctggccaatcgagcgggtcttcaacagaaggatgtcctggaagtgctggaactgacaagcatgtcgtcagagctggttatgcagaagggaaatgcaatcatcaagggcgaattcccgtcccagcaggaactgaagcacatgcagaaggacctcctggcgctgaacctggccgaaggtctggagcaccccctgcccatcacgaccgcctccaacgaggtgtacaagcacgcgaaatgcctcggctacggttcccacgattccagcgcagtttag

SEQ ID NO: 503 - DNA, 1669 bp, Aedes aegypti
atgccaccgaagcgtaaaacagtgccgaaggaaaacatccctccaaagcgtgagaagctgcaagaggagatcccatctaaaaaacccgatgataagcccaaggctgaggaacttccgaaggttgcaaaagaggacaaggttccaggtgaagaatccacagtcgacgatgacgctggtgccgaactatcggataaattgatgaaacgcttcgatgagcaacctccgggcaaactgctgatcgctggcctggtcacatgggaactgacgggcggtcccaaggcaaaaccggtctccaacgtgcggcccaatctctacagcttccatcgattcacgtcggaaatgtatcggtcagctgtaaccggatgttgttcggcacattcggtgctgataactatggacaggaaagcgcttgcgttcggacgcaatcagcacggtcagctgggtcaatccgatttgcggacattcgagaagccaactccggtgaacggattgaaagacgtgaaagtggtccaggccgcttgcggaaggaatcacactttgttcctcaccgataacggggtcgtttacgcctgcggggacaaccgacacggtcagtgcggcgttggccacacgaatccaacagtattgaaagcgactcgtttgaagtacacgggtccacccatcgtgaaggtcgcttgtggggccgaattctccatgatactggacatcaacggaaggttgtactcgtttgggctacctgaacacggtcagctgggtcacaacacagatggcaagtatttcatcacagccaatcgattggcgtaccactacgaaacggttccgaggcagattgtgacgtacgtggagaagaccaatgaaggccgcaccataccgatcgaggacgttcagattttggactttgcctgcggaaataaccacacggttgccattgactcgaaaaatcgagccttttcctggggattcggaggatatggccgtctcggacatgcttcgccacaagatgaatgggttcccagactcaacaaatatttcgacatccagaagcgaaaagttttgcgtgtgttctgcggaacggccttcagcgtggccatcacggacgtcggatgtgtgcacctgttcggacggaacagggtcaacgccgacgccaacatgtaccccaaaccggtgcaggatttgaccgggtggaaggtaacgagcatcggagcgggatactcgtcgattctgatttccgccgacgattcgttgatcgcctggggagcctctccgacgtacggtgaactgggcctaggtgatgtggtgaagtccacttcgaagccgaaactggtgccaggtatggaaggtgtgaaaatatctcacgcagcagtgggtcaatcgcactctttgctgctcgtgaacgtggagcacgaattttccaggcaaaggtacgacgaattgcctgaatttatcgttgattgacttttcctaccacaatatcggctcgccgagcgttttcagtcgtttgagttccattcgattgtatccgttaggttttgaatcgcatttcgttacgatttgattacttgaagtgtgcccaaccactgttggccaatgatattcctattttctatatgtaaggtttccatgttacataactgttactgcttaaattttgcaaatccaataaaattgc

SEQ ID NO: 504 - DNA, 2007 bp, Aedes aegypti
gcttggacataacagacgctacgccaaaaacgctgctcttcgcctacttgggttggctcgctccattcaaacgcaggcataaaggaaaaaaattaactttcttgttcgggctcggcggccatcttggtggtggaagaaaattttgtgtgtgaagtcagtgcgcccaaagtgggaaaaagtctccggaaagtgaagccgattttgcggtgcggtgtgcttgattagagtgattcggtgaaattataactgatttattgaaaaatgggcgattatcatcacgattcgcttggaaccacccagctggacatgggcggcaatccgggaatggttctgcggcgtgccttcgatccgaccgctcacgatttggaagcttcgttccgattgacgcgttttgccgatctgaaaggccgcggctgcaaagtcccgaaggatgtgctggaaaagttggtctcctcactgcagcaggattacactcaggatccggatgccgcctacctgtccatgtcctccccgcggatcggaatcggtctggattgttccgtgattccgctgcggcacggtggcctctgtatggtccagacgacggacttcttctatccgattgtggacgatccgtacatgatgggaaagattgcctgcgccaacgttttgagtgacctttacgccatgggagtgaccgagtgcgacaacatgctgatgctgctggccgtcagcaccaagatgaccgaaaaggaacgggacgttgtcattccactcattatgcgaggattcaaggattctgctctagaggccggtacgtcggttaccggaggccagagtgtggtcaacccatgggcaacgattggtggagttgcgaccacaatttgccagcagaatgaattcatcgttccggataacgccgtcgtgggtgatgtgcttgtcctgaccaaggccctcggaactcaagtggccgtcaatgctcaccaatggctggatcaatcagaacgctggaatcgtatcaagctggtcgtatccgaggaggatgttcgcaaagcctaccatagagcaatggactccatgtccaggttgaaccgaattgccgctcgattgatgcacaaatacaacgctcacggcgccacggatatcaccggattcggtctgctgggtcacgcccaaaccctggcatcgcatcagaagaacgacgtttccttcgtcatccacaatctgccggtgatcgcaaaaatggctgctgtggccaaggcctgcggtaacatgttccagctgctacaaggccactcggcggaaacttccggaggattgctgatctgcttgccacgtgaacaggccgccgcctattgcaaggacatcgagaagcaggaagggtgccaagcatggatcattggcattgtcgagaagggcaatcgcaccgctcgtattatcgacaaaccacgagtgatcgaagtcccagctaaagagtaagatcccaacactttgtgaaaaccattctttccttctttcattatccagtttgacgaatccgaccgacaaggactatctgttaatgatattctgtaagtttcaaataattccacaatctgaagtaaagctaaacttatgatcacaatcacattacttgagctcttttatcaatagaaaataagaaacccagattctttatcaaacttaagtttctaattagtgttttaacagagtaaagagagaaatgtcagtcgagaaattgagagagacagacatggcaagggagtgtaacaaacaaacaaactagacgtaagctcatttaacatttaatttttctcaaaatccccaaactgtaaactgcattgataaaaaaaactaaaacttactgtggtgagcacgcaagctgattgcgagtatgataatataatttttcgttttatgaaaaacaaagctttcaaaaatattttcgagaaaccacgattacagaagataaaaaaaaacatttttgtagatgatagaatatggaaataataaaattattcaaatgaa

SEQ ID NO: 505 - DNA, 1399 bp, Aedes aegypti
acgttttcttgttttcatttactatcggtctgcagctccgcatcgcaacgcaagaatattcatcaaaaagtgaatacgtgttcttgttagcttagttaaacaatagttagaagaaaaaatagttccacatgtgcctgacagtgtaactgagctgtgcggaaaaagaaactcgatttttttgttggtcaagtgcggcttctgcaagccagcagacagaaaagcaccatgtcgattacggaatatgtccagctggcacttttattcggttctggctttatattcttcctgatgattgtggttggaatcatcctcaaagtcacaaccacacccttcccgcacattgtccgccataaggaggaggagagcttcgtagattcggtcacagatgaaagacagaggtttccatcgctggaagacccaccgactttggaactgagcgtaattgttcctgcctttgatgaggagaagcgactaccggttatgctggacgaatgccttgagtatcttgaatctcgaagaaaagcggagaaatccttctcctacgaagtgattgtcgttagcgatggtagccgtgacaaaaccgtagaagttgcccaaaagtacgccgtcaaatatggcaccgataaggttcgggtgttggccctggtagagaaccggggcaaaggtggtgccgttcgattgggaatgcttagcgcacggggtcgatttctgctgtttgccgatgctgacggggccaccaaattcccagactacgctaaactggagcaaagcatggcccaactctgcgggaatgatcataccaaagatgccatcgcaatcggttcccgtgcgcatcttgagcaggaagccaccgcccaacggaccttcttccggacgctactcatgcatggttttcactttctggtttggacatttgccgtgaagaagattcgcgatacccagtgcgggttcaagctgttgaccagatcttccgccaggaaggtgttcgccgtgatgcacgtggagcgttgggcattcgacgtggagctcctgttcattgcccaatcgtacaacatcccgatcgaggagattgccgtccgctggaccgaaatcgaaggctcaaagttgactccattctggtcatggctgcagatgggacgcgacttgatcttcatctggttccgctatgcaatcggagcgtggcagttgcggaaggaacacgtaaattaaaggcagtcgatctcatagcggcttggttggacgagtgctgtgcattttatagacttctaagagtggaacatagctgttccagaatttattcctaagatcatgtaatctacgtacattgctattgagtaacgcacctatagaataaatgtcaacgaatttgagttcaaaggacgatctttatcttcttaaa

SEQ ID NO: 506 - DNA, 903 bp, Aedes aegypti
atgctggacgaatgccttgagtatcttgaatctcgaagaaaagcggagaaatccttctcctacgaagtgattgtcgttagcgatggtagccgtgacaaaaccgtagaagttgcccaaaagtacgccgtcaaatatggcaccgataaggttcgggtgttggccctggtagagaaccggggcaaaggtggtgccgttcgattgggaatgcttagcgcacggggtcgatttctgctgtttgccgatgctgacggggccaccaaattcccagactacgctaaactggagcaaagcatggcccaactctgcgggaatgatcataccaaagatgccatcgcaatcggttcccgtgcgcatcttgagcaggaagccaccgcccaacggaccttcttccggacgctactcatgcatggttttcactttctggtttggacatttgccgtgaagaagattcgcgatacccagtgcgggttcaagctgttgaccagatcttccgccaggaaggtgttcgccgtgatgcacgtggagcgttgggcattcgacgtggagctcctgttcattgcccaatcgtacaacatcccgatcgaggagattgccgtccgctggaccgaaatcgaaggctcaaagttgactccattctggtcatggctgcagatgggacgcgacttgatcttcatctggttccgctatgcaatcggagcgtggcagttgcggaaggaacacgtaaattaaaggcagtcgatctcatagcggcttggttggacgagtgctgtgcattttatagacttctaagagtggaacatagctgttccagaatttattcctaagatcatgtaatctacgtacattgctattgagtaacgcacctatagaataaatgtctcaacgaatttgagttcaaaggac

SEQ ID NO: 507 - DNA, 924 bp, Aedes aegypti
aacgaaatggccaaactaatcgatgggaaacaaatcgctgccgacatccgcatggaactgcgcgaacagattgaggaatggatgaagcaaggtggtaatcgcgctccgcacttgactgccattcttatgagagatcccgctagtaacacttatgtttcaaacaaaatgaaggtttgtaccgatgtcggcatcactagcaaaaccgaacgctactcggcggacattaccgaagagcagctgttgaagcgtattgaagagctaaaccaggacgactccgtggacggaattctggtgcagcttcccgtgccaggtcacatcaacgagcgtaaagtgtgcaattcggtgtcctgcgacaaggatgtggacggtttcaatgaacggaacattggccggctgtgcctggacatgaacacactgattccgtgtactccgttgggcgttcaggaactgatcaagcgcaccgaaatcgagacttttggcaaaaacgctgtggtggtcggacgttccaagaacgtcggtatgccaatcgccatgctgttgcatgccgacggtcggaacgatacctgcgccatggatgccaccgttaccatgtgccacaggtttacgcccccggaggaactggcacggttctgccggacggcggacatcatcgtaacggcaacgggagtacctggcctcatcaaggccgatatggtcaaagaaggggcagcgataattgatgtgggaattacccgggtgaaggatcccgaaaccggcaaaaacaaattggtgggcgacgtggactttgacgaggttcgcaaagtggcaggccacattacgccagtgccgggaggtgtcgggccgatgacggttgccatgctgatgaagaacaccttcatcgcggcaaaaaatttggcacacaaaagggctgacaaggaaaagtga

SEQ ID NO: 508 - DNA, 1218 bp, Aedes aegypti
ctggagtcggtcagcttgaacgtgttgggttgtaaagtttgggtcggttattttgttgttttcaattattctatctacgctcgttgtgttttttttatagatcctttgagtgattcggaaaaaagataaaccatgcggctcatcatcttggacacgtccgactacgtcggtgaatggtcggctaagtacgttatgaagcgtatcaacgattttaaaccgggcccgagccggttcttcaccctgggcctcccaacggggtctacgccgctgggcctataccgcaatttgatcaaattccaccaggaaggcaagatttccttcaagtacgtgaaaaccttcaacatggacgagtacgtggacctgccgagggaccatcccgaaagctatcactacttcatgtggcacaacttctttaaacatatcgacatcgatccggtcaatgtgcacattctggatggaaacgccccggatctggtggccgagtgcaacgcgttcgaggataagatcaaggctgctggcgggatagagttgttcatcggtggcattggaccggacggccatattgcgttcaacgaaccgggatcgagtttggtgtcgagaacaagggtgaaaacgttggcacaggacacactggaagccaatgcacgatttttcggcaacgatatcagtaaggtgccaaagcaggcactaacggtcggagtgggcacggtaatggatgccagggaggtgatgattttgattattggcgcacataaggcctttgcgctgtacaaggcgatcgaagagggagtgaaccacatgtggacggtcagtgccttccagcagcatccgcatacgattatgatatgcgacgaggatgccacgctggaactgcgggtcaagactgtgaagtattttaagagcctgtacgacgtccactcgaagctgattgaaggcacgtagtagaagaaccatagaaatagaaccttccagctggagatggcctgacgacggttagcaggagttgtgctctgtccgggcgaatgaacatcacacattttagcactttttatagtcactcgaatccaaagggtagaattaacttttataatttgtgttacgatttaagtttagacggtccgttttcgtcccttactcttacttatgccagcagcaaacagcagctggtgtatgatttctttacagcgataataaagatggaagggcatggaattttaa

SEQ ID NO: 509 - DNA, 2005 bp, Aedes aegypti
tagcgattactcggatgcacaataggtggctatgatgcgctagtggctacgtaggccttacgtaatatttgaatcaccctaatcagcatgaacatcagcgttcgtcaaatgacagaacggtgctgttttactcctggttcacccgcgggtcaagcgggtcacggcgcacggaaacaaggcaaaaggaaaggcgggggcgcttcgattcattccgttttgccttgccactactgttctgttcatccgcttgcgtgtgctgtgtggtgtcgatttttctcaaagtgcgatcagcttttctgtgaaaaaggccatttcccccaggaaccgtgcaaaatgtttgcccgtacgttgaaaaccgttgctacccagggagttaagaacttctccacaacaagccagaacaatgtcaaggtggccgtttgcggtgcttccggtggcattggccagcctctgtccctcctgctgaagcagagccccctggtgacggaattgtccctgtacgatattgtccacacgcccggagtggccgccgatttgtctcacattgaaacccactcgaaggtcaccggctacaatggggcggaaaatctggagaaggctctggccaatgccgacatcgtcatcattccggccggagttccccgcaagccgggcatgacccgtgacgatctgttcaacaccaacgcgtcgattgtgcgcgatttggccgcaggatgtgccaaggcttgccccaaggccctgatcggaatcatctcgaacccggtcaactcgacggtgccgattgcctgcgaaaccctcgccaaggccggagtactggatgtgaagcgtgtgtttggcgtatccacgttggacatcgtccgtgccaacaccttcatcggtgaagccgctggcgtcgatccccagaaggtcaacgttccggtcatcggtggccactccggtgtgacaatcattcccgtcctgtcgcaggccaccccctcggtaaacttcccccaggacaagatcgctgccctgactgaacgtatccaggaagccggtaccgaagtcgtcaaggccaaggccggagctggttcagccactctgtcgatggcctacgctggagctcgtttcgctctggccctggcccgtgccatgaagggcgaacagaatgtcatcgagtgcgcatatgtccgctcggacgttaccgaagccaagtatttctccactccgctgttgctgggcaagaacggacttgagaagaacttgggactgccaaagctgaacgcctttgaacaggaactgctgaagaaggctctgccagagctgaagaagaacatccagaagggcgaagacttcgtcggcaagaagtaaagcgaatctatgtcaaattactgggtggcactataaattatcgaaaaaaaacatctgttaagtacaacaactacaacagcgcatttggcaggctaccttaaaatttaccatcatcttttgataagtcaactaccgatattaagtataattgctgccctaagagcagtcaaaccaatcatccgtagctacaaaaaatcgatattgttctctctggtagacaaaaaacaccttccaaagagtaagtcatagtgaaaaaaagaatggaaaccatctagaatgaaattcgtgaataaagttatgtgttaagctacttccatgatcacgatgtgatactaaactacagttttgaaagaattccataatgtcttcacacagacaaacagtcgacgcagtctaatcattgtccatcgactacctttttaatggttgattcgtatatattttttgaactcttacggtttttatgacattactagcatacatttttccttaataatatgcaaaattattttcatggagttgtcagatatcaaagacatgctttcaagtttttttttattcgcgtcataggttttactttttctactgattttttttttgaatataactttcgataacaatttcgggacttaagtataattggtcggtgttcagacag

SEQ ID NO: 510 - DNA, 2058 bp, Aedes aegypti
atgttgagattagcgttgttcaaaccgtccctcaccggacgactactgtccggtcctctacgaactctgtcctcaaatggaagcaacctttccaatcatccagctgccttcaaaaacgacaactctcgttttcagcagcagctgaacagcaatcaactccgccagctaaacgacgaataccgtgcggtcctccggttgctgtcccgctcctccggagtgccccagcatatcctgagtcgcagtttgcacagttccgtgcgacgattccagcagaatcgtgacgaaggaagttcctccggttccggaccagatggaaagaagcccaaaaatgacgatgacaaggagaagatgatgtcgctggtgacgaagaccctgttctggatgaaaagtgtcgtctgctatcactgcggcaagccagggcaccggaagcgaaattgtaaggcgtatctggcagagtgtggcggcaatgcggatccgaagagaaaaaaggctaaggccaaaacagtgcgcgaaaacgacgcaaagtcgttcacgtttatggtgcggtccggtaagcatgatgcgagtgcgtggacacaaatgggccgcgccaagttcactctggtggaccccgtcgagggaggccgcggcgtgtacttcaaggatgtcgccggactgcaggaagccaagcaggaggtgatggaattcgtcgactacctgaaagccccggaacgctatcaacgtctgggggcaaaggttccgaagggggcgctcttgttgggaccgcccggatgtggcaagacactgttggccaaagcagtggccacggaagcggccgtgccgttcctcagcatgaacgggtcggaattcattgaaatgattggcgggctgggtgcagctcgagtgcgggatctgttcaaggaagcccgaaaacgatcgccttgtatcatctatattgacgagatcgacgccatcggaaggcaacgagatgggggcggtagcttcggtggggtcagttccggagaatcggaacaaacgttgaaccagttgctcgtggaaatggacggaatggcttccaaggaaggcgtcctaatgttggccagtacgaaccgggcggacattttggacaaggctctgcttcgtccgggacgcttcgatcggcacattctgatagatttgccgaatctgaccgagcgaaaggaaatcttcgagaagcacttatcgggaatagcgttggaggcctctccggataaatattccgctcgcttggccacactaacccctggcttctccggggcggacatagccaacgtgtgcaacgaagcggctctgcacgcggctcgttctagtcagaagacggtcatgaccaaaaatctggaatatgccgtcgaacgattggtgggcggaacggagaaacggtcccacgcactgtcgccagtcgaacggagggtgatagcgttccacgagtctggacatgcgttggttggctggttgctgcccaattcggacgtgctgctgaaggtgaccatcgtgccgaggacgagtttggctttgggtttcgcgcagtacaccccgaaggagcagaagctctacaccaaggagcaactgttcgacaagatgtgcatggcgctgggaggacgggcggcggagaacattacgttcaacaggataaccaccggggcgcagaacgatctggagaaggtcaccaagatggcgtatgcgcagatcaagtacttcggcatgagcagcaccatcggtccgatttccttctccgaagagtcggaatccgacccgtacgccggcaagccgtactcgaagcagatggccaacctgttcgacgtggaagcccgccggatgatcaccgaggcgtacgaaaagaccgagcaaatcctgcgggacaacggcgataagctgcgcactctggccgaagccctgctggaaaaggaaaccctcaactacgaccaggtggtggagctgatcgggccaccgctgtacgacgacgccaagcgcaagatcgaaccggtcgagttcgaggacagcctgaagaagctggccaacggcggagaggaacccaagtga

SEQ ID NO: 511 - DNA, 3466 bp, Aedes aegypti
gcgcgggtctagcgaaaggttcgcttatcaatcaatcccccccatacgtagtgcgagttcgcgcttatcaatcgcggagtgtgagggtagagaaagcgtgcggaaagttcggtttcggtgagtgccgcttatcaagaaccgctcaacctgacaccgcgacgcgacctgccgaggcatccaatttctgtcccatgattacaacaaaggtgccaatcgagtgtagtggtcgcattcttgttatttttccttttctgcgtaatatcatcgtgctgtgatagtacccaaaacatcagtctcagagattcaaggtcgacgacatgttctcgttcttgtgctgaagaagactacgttcggtgatcaagtgcgtggtgtggcgtagcaagaaggcaccgagctttcctatagttttccgaaatttgaaaaagaagatggtgaatagaaaaatgtctgcactagggcatcaggtgaacatgaacaacttcctgtcgctgctggtgggtgcttccctagtggcggccaactcgtccccgaaccatgaccttacctcattctcccaaccgaccgagttctccaacggagtttcgtcctttgccctgccagccgaggaccgtatggcgttcgatagctataccctagcctatctcaactactcgtacgtcgacggcaacgagatggaattccacgagggtgaactgattggaaagtttggagaaggccgggttctgaaccggaccggtctgttggtgcacgttaccaagtcggacgatccgaacgaacaccggggctgctccaaggattggaacgggaccaagggccaaccgctgcccgccaacggcattaagtggatagctctgatcctgcggggaaactgcaactttgaggagaaagtcaaacatgcatacatgcacggagccgccggggttatcatctacaacgataaggacgatccgcgtttggataaaatgaagattaacgacaaagaacgaaacatcaccgccgtcttcacgaccaaggccaagggtcacgaattgatcgacattctggagcgacagggctacgaagtgacgatcgaaatcatcgaaggaagtcgccacatccgctcactggccaacatcaaccgaacatcggtgctgtttgtatcggtttcgtttatcgtgctgatgatcatctcgctggtgtggctggtgttctactacgtacaacggttccggtatttgcaaaccaaagacaaacaatcgagacgactgtgcaacgtagcgaaacgaatcattgccaaaattcctaccaagagtattaaatcagatgacaaggaaatcgacaacgattgttgtgccatttgcatcgagccatacaaagtgacggatgtgatacgcgttcttccctgcaagcatgaattccacaagacctgcatcgatccgtggctgctcgagcaccgcacctgcccgatgtgcaagatggacatcctcaagcattacggcttcgtgttcaccggtagtcaggagagcatccttcagctagatttggacatggaagaaggagacttgattgacgatcacagcagtaccgacggtggatatcaaagacgacacagcgtaagcccattgccgcaaatcagagcctccaatgagaatcgactctcacgaacctcctcggagtcggactcggacaacgagcatcaaccgtcctccagccggcatcactccaccagacaatcgatgacgcgtcgcgatagcacctcatccggagcggtcatcactaccgggtgcaccgattccgatcgacatccggacgataacaacatttgcgtcggctgtttggctgcggcgttgaacaagaagaagcataacatggagagcaccttcccgcaggacgatgccgatagtgataccttctccaccggaccgcatggttcctcgagtcttccggccactctcaagaaatacaaaggcaaccactcgaccggttcgtgccgtggcatgaatcccccagatcactaccaccagcacattccacagcagtcacaatcgaagcttccgttcaagttctataaaaccgatcacagccaggcacgcaaggtgcgaacacccctgaagaaccttatctcccaatcggtatcggcaccatgtgacgacggttccctaaccaacatcgacctcggttcggaagtgcacgatgactgtacggatgctccagcagttcccaaacagccaccacgtcgctgttccctgtcccgaacatcttccagtggttcggagtcgcgaaattttgcccatctccatcaccatcatcgtctcccccgtgaagaaccaccttcgcatgacgacgatccggaacacgacgacgaaggttcggacgaaaccgaaccgaacagtgacaacgatctgattgccaacaagagcagggatggcctcgaaaccgagtgcaagaagaagtgataaaagtgatattaggataaatcaaattttgaactgtaacaagtgaaacgcgaggattcgcgttttattttcagtgtatctcatactatagttgctcctgagtttaagattttttttctatagaaatcgatccgatttggacctagaaaaaagttccgaaacattttagagatagattgtaggtaaaattttgctaacagaaagatgaaaaaagcatcatgtgcgtgatataaatgttcttattttctctctatcctccgaaaccagcgaacgaatttttccagtgtagtgtgttgttcaattctgatgatttcgtgtattttgttgtatgatccttccacgtttttttccgctcaagaagttgaggcaatactactactatctagatgaaaactacaaaatcagaacagaaaaatgtttctatatagaaaacgctaggaaaattgtcaacgcgaacactaataatagtagaacaataggctatacattctaaccccgttaaataggacgaatgaagcataagagatattcaagacgaaggcgctataagtaacgtaggctccaatcagaacgtagaatatgacgtttgttcatttacggaaaccgtcacttacaagaagatcggttttgattttgaacgttttttttttctaacgtaagttaagcggactcttcattggagtcgattacaggactcgtgctcaacggacccatttcatttctttgggaaacatttaataacacgttttctcgtttcaagtcgttacccagcaaaatcaataaagtcctaaagccctgtccaaattttagttttaaacgcttaagtttaggtcagatacacatgtttattcaatttttaatatttttcgttggtttgagtccataaaaacaattatttacggtttttgagattttgtcctacgccttggtttaaactcatgatttgcgtatattttgatttccgtgtcgcttccgaaatgtcagataaaaacaaccccagtgccgtttttgtcgattaagtgaacgtcaaa

SEQ ID NO: 512 - DNA, 1086 bp, Aedes aegypti
atgatgttgggattgctgacggtactgagctgcctggcggtggtaacacgtgctctggaaggtgatgagtgccgctttggttccggtgttggggtatgcgtcggctttaccacgtgcggtccggtactaaaacacatccaagcccgaatcagtatttgcaattacaccccacgtgaggccgtcgtatgttgtccagtcgactatcgttcgcgactgcagaagatccggcagcaggccgatgccctgagcgttagcatgagaaaatgcaaagagtaccaacgccctgccaccgtgtacctcagctcgctgaaaccgaacgccgaggtggtccagaagcaagccaagcagtgctccaacgacaacaagctgatcatcggcggagaggctgccaagtgggccgagttcccgcacatggctgccctcggatatcgggacgacccgaacgaacccatccagtacaaatgcggcggttcgttgattagcgatcacttcgtcctgacggcagctcactgtataggccaaagcttgacgacggttcggttggggagtttgaatttgctgtcctcggctgcccacgagtacgaggtggaggacactttcagccatccgcagtattcggccaaatcgaagcacaacgatatcgcgctggtgaaaacgttcgagaaggtgccgttcagcgcggaagtcaggccggcttgtttgtaccaaacggcgaatgtggcggagcagaagctgacggcgtccggatacggagcgagggagaattacggcgccagcgcgaacgtcctcatgaaggtggtcctggaccagtacgatcggtccacgtgcctcaactactactcgcaggccggagcgcgtcgcctcatcgacaaccagatgtgcgttggattccaggccggagggcgggacacgtgccagggagattccggaggtcccctgcagatccgcgacgcggagaacgattgcgtctacctcatcgtgggcattacgtcgtacggttcgtattgcggcggggaagttccggccatctacacccgggtcggagcgtacttgccgtggatcgagtcggtcgtttggggcgcttga

SEQ ID NO: 513 - DNA, 1245 bp, Aedes aegypti
atccgcaaaagtttgcctcgcgtgttgggtttaccgctttgctgctcccacttcccgattccgcgcggacacttcctttcgcaccggtgtcatcgaattggtactgaaataagtgcaatcgcggcttgtctataaaaagaatctacatagtgtgtgaagtagtgtcgacattttgtacaaagtatccgatccggaattctgtgcgttgaccggtgaccaaagagaaagacgacaacgacctccaaatccaaaatgcagcaccagtgcgagacggaaaactgcaagaacacggccaccctccagtgtccggtgtgcctcaagatgggcatccagggatcgtacttttgcggtcaggattgcttcaagagctcctggaaggggcacaaggtgattcatctgctggcaaagggcaaggaggacaagaatgtgtacaatccgtggccttactatacattcaccggaaagttgcgtcccttcccgcagtcggagaagagaccggtcccggagaggattccccgtccggattatgccgaccacaaggagggccgttccaagtcggaagaatcgctgcgcggaaacaccacgatcaaaatcttggacgacgaggagaaggaaggaatgcgtgttgcgtgccgtctggggcgggaagtgctggacgaggctgcgcgcgtctgcgatgtcggagtgaccaccgacgaaatcgatcggatcgttcacgaagcctgtatcgagcgagaatgctatcccagtccgctgaactactacaacttcccgaagtcgtgctgcacgtcggtaaacgaggtgatttgccacggcattccggatatgcgtccgctcgaggacggggacctctgcaacgtcgatgtgaccgtttatcaccgaggcttccacggggatttgaatgaaacgttcttcgtcggaaacgtcaaggagcagcacaagaagctggtgcaggtcacccatgaggcgctgatgaaggcgattgccattgtgaagcctggcgagcggtatcgcgaaattggaaacgttattcagaagcatgtgcatgctcatggattcagcgtggtgaagagctactgcggacacggcatccatagactgttccacactgcccccaatgtgccacattatgctagtgagtatgggggatgggacgagaatgggtaacacttgttaaataaaacttcagaacattctgttcttctggacttgtggttcaggtatggagctacatgctctcatctc

SEQ ID NO: 514 - DNA, 1151 bp, Aedes aegypti
aattgatcagcaatttcaaaaatatcacaatggatgtattgaaggcagagatagctcgcaagcgtaaacttttggaagagaaaaaacttgtggatgaaaagaaaaagtactttaaacgaggtgaattgttggctcaggagcaagaggagtataaggcaaagtacggacagcaagccagcggtagcggagaaactcaggcaaatcacggcgacggcgacaaatcaccgacaaaagattctaagtttgattttcgcaatcttccccgatcggaagtcatccggaagttgcgagaacggggggaaccaattttactattcggagagtccgaagcggattcctgttcgcggttgcatcacttggaaatttcggctccggagattaaccgtggatttagaaatgatttccaggaagctatggaacaagttgacgaagaatatttgaacgaaattctgacctccaatggaaccggcttgagtaaagggaagtcctcgaatgaagactatgcgattgacgattctgtgacatacgaatcaatacaggaaatggctgtacgcctcgggagaagcggcaaagaacatgatatgcatgttataaccactttgatacagtttatgctgaaaatgtggaacgatcagttgaactcgggaacgaccgcgcaacgcacagcgaccaaatggaaaatcgccagggccacattcgagcagactcggttgtacttgaaacccttactccggaaattgcgaaacaagagtatacccgaagacattctggacagtttgacggacataactaaaagtctcctcaaaagggattacatccatgccagcgatgcttacctcacgatggcaattgggaatgctccgtggccaattggtgttactatggtcggtatccatgctcgtactggtcgggagaaaattttctccaaaaacgtagcgcatgtcatgaacgatgaaacccaacggaagtacattcaagggctgaaacgattgatgaccaaaatgcaggaatatttccctaccgatccatcccgatgtgtagaatacgtaagcaagaaagatagagttgattaacaaaaactagctataaggcttgtagtttataaattatttgatgtatgaataaaactggcctaaggttaatataatttc

SEQ ID NO: 515 - DNA, 1990 bp, Aedes aegypti
gcagtcatcgttcggagtttcgttcagtcggacgtgtttcggtttcggttcccagacaagcagctttagatttggttcacccaaaagggccattcctagacagttcctccccccagaaaagctctctctgttcgtgtgacataactggttaccctcggaagtactggttcaacgtgtccggaattatataatatagaagcacaaggagcggtcagttaacgagttcacaaaatctgaccaattggcccactgaaggaataacggtgctcttgagagaaagtgtcttgaatggaagacgtggaagagtgaagcagacgagaaaaaaagaaagttacacttttggctgcccgtttcatcttctgtcgtgtggcttttgaagaagaaagtttcgcttgttgtaagtttacgcttcgaagttgattgtgaattaacacacgttacgatgagcagttggccggagaatgttggaattttggcgctggaggtgatctttccctcgcagtatgtggaccagacggaactggaggtttacgacggagtgtccgcgggaaaatacacgatcggactgggtcaaagccgaatgggcttctgttcggatcgggaagatgttaactctttgtgtttgaccgtcgtgaacaatttgttggagcgtcacaatatcccacactcgaaaatcggataccttgaagtgggcactgaaaccatcgtcgataagtccaagagtgttaaaacagtgttaatgcagttgttcaaaccagcaggtgttaccaatctagaaggtatcgatactactaatgcttgctacggtggaactgctgctttgttccatgcttggaattgggttgagtcttccagttgggatggtcgtttggctctggtagtctgtgcagacattgctgtttatgctcaaggatcagcaagacctaccggaggagctggagccatcgctatgctggttggccctaatgcacctcttgttctggatcgtggtcttcggtctacttttatggatcacgcctacgatttctataagccagacctcagttccgaatatccagtggtggatggcaaattgtctatccaatgctatctgggtgctctggataactgttaccaattgtacaggaaaaagtacacccaacaaaaccccgatgcgaatgtgaatctggatgtgtttgatgccgttattttccactccccttactgcaaattggtgcagaaatcgctcgctcgtttgggcctgaacgactttgtacttacgccagaaaacgaacgcgcagccgcttatcctgggtttgagcagttccaaaacgtgaaattagaggaaacatacttcgaccgagatgtggagaaagccttcatgactcattacgcgccagtattcaatgccaagacgaagaaatctctccacttagccaatcaagtcggtaacatgtacactccttctgtgtatagcggattggtgtccctgctcgtcaacagcgatctatccgagctggcaggcaaaagagtcggtgtcttctcgtacggatccggccttgcctcatcgatgtactccatttccatcactagcgatacccaagccttgggtgccttcaaaacccatctgaattatgtcctgccactgttggagtcccgacaaaaagttgcccccgaagacttcaccaaactgatggaagttcgcgaaaagaacaatcacgctgctccctacgaaccgtccggaagcgtggacgttctcttcccaggaactttctaccttcaatccgtcgacaaaatgcatagacgtgtgtacgaaaaggttcccccgaaatctacgcaaacaaattgtacttcctagtgcccttggttaagcttttctagacgaagcgtagagaacggaaggctgggttttcctctcgttttgggcttatgatgtatgaaagaaactgttatttattctttgtgaaggtctaatcttacgccgtggcttcatgtacaataatagatatga

SEQ ID NO: 516 - DNA, 8208 bp, Aedes aegypti
ttcgctttaggcttttttcaaatgttgaacccgtaaatcccatgcagcacacaggatgacgttgacgttaaaccactcgcacggcaccactttttcgcccgcatcgctcatcgggtacccctttcaacaaaagcgtcgaaaatttgttcgcatcgaccgccgccattatcatccttcagcatcatcagcagcagctagagtgtgaagcttcttctcggtttatacgcggacgccattgtttattttctgcccgctaagcagcgacaaatccgccgttccggtttacgtttcgacgcgtaaatagtgcgtaaccggtgcatatcggagtgctgggtgccgtggtgataaagtgcttaaccaaagtagccaaactccggtagtgtgaaaaaacgcaaagtttggctcgaacattctgcatcgaaacccgaaaggaatagccaactaaacgcgaaatagaaagaagaaaaactgatcagtgtaggaaaaaaagtgtagaacgatttttttcaatgaaaaatcaagtgaacgatatttgcaaagtgcaaagtttattaatcggtgacgcgtagtggcattatttgatcaagaactccaccgacagtgaagtaatagttcagagtgaaaattttcgcatcttctgtgtggcatgacagccatatcggaagcggctgctggcaccgaactggtcccagcatccgcgaagaataatgccatcctccgatggaagcgcgtaacaaatcccagtgggccgcagccacggcctcgtcatggccatcgggccgttaacatcaaggagctaatggtggtctttggcggtggaaacgaaggaatcgtcgatgagttacatgtctacaatacagctaccaaccagtggtacgtgccagccaccaagggagatgttccgccgggatgtgccgcgtacggattcgtcgtcgacggaacccgcatcttggttttcggcggtatggtcgagtacggcaagtactccaacgaactgtatgaactccaggctaccaaatgggagtggaagaaattgaagcccaaaccgccagagtccggactgccaccgtgccgacggttgggtcacagctttacgctggtcggcgacaagatctatctgtttggcggccttgccaacgaaagtgacgacccgaagaataatattcccaagtatctcaatgatttgtacattttggagatcaagaacaatcaactgcagtgggagataccgacgaccttcggcgagagtccaccaccgcgagagtcacacactgcagtatcttggtacgataagaagcaaaagaaatactggctggtcatctacgggggtatgtccggatgtcgactgggtgacctttggctgctcgatacggacactatgtcctggactagacctcgaaccagtggccctcttccacttccacggtcgctgcacagctcgaccctcatcggcaaccggatgtacgtcttcggtggatgggtcccactggtcatggaagacgtcaaagccgagaaacacgaaaaggaatggaagtgtacaaatacgctcgcttgtttgaatctcgaaacaatgacctgggaggagctggacctagacacggaagaggacaacatgcctcgggcccgagccggacactgcgccgtcggaattcacacccggctgtacatctggtccggacgcgatggctacaggaaggcctggaacaaccaggtttgctgcaaagatctgtggtacttggaagtggaacggccaacagccgcatcccgcgtccagttggttcgagcttcaacgcactcgctcgagctctgctggccatcggtgccctcggcggcctactacattctggaagtgcagaagataccgcaacctcccccaacaccaccggcagcgccagcaccggctccggttccgagcattactccaacgccggcagctgccgccgcagcatccccggcccatactccagcggccatcgcttccccaatcgctgccattccgcaacctgtaccagtggctgcagcagccaccggatcgatgtctccagcagcggcacagcttccggcagggcttaccagcggggaacctcatctgccgcaaccaattatcaaaacccttccgggtcgtgccgtggcatcgccaatcgccgtgtccccatcaccagtggccgttcatccgtcagcatccccgctggctggcagtgccagtccgaacattttgcaaaccgccgcccaagccatcagcagtccggtgcacaatccacccggaatgcaatcgccaacgccgattgccatggccgccgtaccatcctccccggtgcacagtgtcacttcgcctccggtacagcgcatcgtcaccaaggttcaagcggccaaaccgcttcaacaacagcaaccacaacaaccgaaacaggtgctcactccaagctctccgattctccagcagcaacccacgcagatcatccaaacgcaggttcaagctcaaccgattgtgcaacagcagcaagttactcagatcacccaacagcagccgcaaacgatccgggtggtcagcggaacgggtgccatttcaaatgcccaacagatcacaaccggtgcaggaactccaatcagggtgctgtcttcgaccggacagcaagtgcggattgccactcagcaaccggtggttaatgttagcaccgccaccgttcagcaaatggccggtcaacaaactgctacggtactgcgcggtcagaacatcgtcaccgccggcggtcaactgcaacagcagcgtattgtcagtgctccggcaggatcgaccactactaccgctacgataggtggcaaacagattatattgcagaagccgttgactatcgtaggtggaaccgctgggggtactgctaccggtacgatcaataacgctgtcaatcagccacagatcgttaccctggtcaagaccagtcagggaatgaccgttcaaaccctgccgaaaatgaacgtactacaaaagggaacggtagcgggaaccatccaacaaccgcagcagattgtcacgtcgaacattatcggaggcggtggtaccattcagcaggcgactgttggtggccagaagacggctgttatcggaggcaacgtggtcaagttgatgtcgtccaccggaacgataggtggcaaacagatcctgatgaagaatccgaacattgttcaggttggcaaggtggcaacgaatgttgccggcaaacccacgctggtcatcaccaataaggccggtcagcaaattcgaaccggcaatcaacaagtcatcgtggtgacgactccacagggtatccgtaccgtcagtggaaccgtcacgtcgtcagcgaataatttcgtctcactgtcaacttcacagatgatcaatacaatatccacgtcccgtgccacaaacatcggtggagcaaccgttttgcaagcgggcacggctggaaccgccggtactgccaatatcggtggacaagccatcaagctgcgagctgttcaaggaggaaagcccattaccttcaccgttcccgttggaggactgcaagcagcgggtcagaagatcagtggcacgcagataatcaacatgcagcagaagtccctcacgattggtggcaaggccgtcactgttcagctagctccctcggctggcggacagaaaacggttaccattgttccatcgtcgaccggagcaggcactgctggaggaattggaaccaccatgacaggcgttcatggtcagcaaaagattgtcatgttgccatcgaagacgactacgcggatagtgactcaacagcaatatcagcagattcaacttcagcaacagcaagcgcaactccaacagcaacaacaacagcagcagcaggaacaggtttcgacggatgccgcgttcgccgccctggctgctgaagccggtctgattgagaatgacggcgatcaaattgagcaaatggatggatgcttcgatatgttcggttcagacgacgactcagacgaggaaggacagctaggtgctcaaatcatagaagttgaatcgatggaaggtgcttctaaatgtaaaaagatgaagctatggcctggagtcatagaacagctggacggatgcaacgatttcctttcttccgatgacgacgaagacgttgctatggaggaaactgtgtcgaggcggacacctcggtacgtacgattaggactgtttggaggtgctgcagcaattgggaccccggaaggagaatcgaccgaagagcaagatccgcttgctcaaggtgaaccaccggcggaaggtacagcggctgcagcggaaggtgccgaaggccacgcagaagccaatgctgccgaatcgatggatcaggatgaaccgatggaggcagatgctgctgctacagcatcagagtcgcaacagcaagcaggtgatgagggtgtttcttcggccagtggcttagacgatcagcagcaacttctgtccggagaggaagccggggaagtcgattccagtcaaactgcaaatggtgatttacctccactgcagccgtcggaagcagcatcaccttcggtagctccggatgccagtgaggctacagcggctaccgcagagccggctgatgtttcgatggaggacgtagccctcctggcgggcagtggtgtcaccgaagcggagcaaagtgggcttgcggaaacgacaaacaatatgtccttcggcgatcaaccggatagcagtgcaacgtccacgcaagacgcggtgaaggatgccctcagtgcaactaccgctgtgatgactggcagtcccgatgacacgagctcaaagatggccgattcagcctcggcaccactcatgaccacatccggcactcccggaacggttcaactgttgaacgctgacggcacttcgacaaccgccaccacaatggtcgtcagtgtgaacagcgctcccactgcatcggaaaccgaagcggccaacattctcactaccatcaaaagcggagagctgctttctctgcaaaatgccgatctgctcgccgctgctggttccggtagcgacaatattatacaactcaactctggtctgctgcagtcaagtagtacaatggaaggcttcacgagatctttatccggcgaaacgcaaaccatcacgttcaaaacgaccggaaacggtagcgaactaacccaggttgctaccttggccgatggaactcaactggtagcacagcttcccagcagttccatggtcaaatcggaagaccctacaaacaccattaacactagcaccggaggacatctggatgctctggcagaggccgctgcctcggcaacttccgtactttcagatctgatgagcacgacgtcgtcatcgacggtttcatcatccccctcgggagtgctcaccatcgctgcaagtccacagacccagcagccaacggccaccaccatcaagtacttcgatgccaactccaccaactccaagcagtttatgttgacttcgcctttgttacaatcaccggtaaatcccccggccaatattttgagcaatagcaacaacggaacgatgaattcatctgtcccgacggtcgtcacaacgattcctggaactactgctaattcagcaagtaataagataatcaccactacgaaaaccatacggggaacgaacgccaaggcgaaagacgaaaaggaagacgccaaacccaaaattaaggacgaatcggaaaagtggtacaccgtgggcatcttcaagaccctatcgcacactgtgtccaactttgtcgacttcgacgagtggaactgtctgtacgacggcgatacgctcaccgcggacaaccttccggatttggttaagtataagaggataaatctggaaccgggttgtgcctatcgattccgcgtggcggccatcaacagttgcggccggggcgaatggagcgacgtggcacccttcaagacctgtctgccaggcttccccggtgcaccctcggctatcaagatttcgaaatcgaccgacggagctcacctatcgtgggaaccgccaccatcgaccaccggcgacattttggagtactccgtttacctggcggtcaagtcgcaaaatgccaaggataaggccaaccaatcggcgcagcttgcattcgtgcgggtctactgcggaccgaacaatcagtgtacggtgccgaatcaatcgctgctgacggcgcacgttgaccagacatccaaaccggcgatcattttccgcattgcggcacgcaacgacaagggctacggaccggccacgcaagtcaggtggctgcaagatccccaatcggccaaaggaacgcctgcccccggcgccgcaggtcaagccactggatcgtcttcggcggcggtgaaacgacttagcgacaaatctccctcgacgaacacgaaacgggcaaaaacgggcgtcaactcgtcgatgattacatcgcccaactaggcgggttccgttgcgattcggttcatacgtcgatggttgtaaaatgtacaggactataagaaacaggatcggtgtgcgatcggaagcaaatcgtgtaaaaagtagcgtcgcaaatgtagttttaataatcggataaagtgttagggcaaaccatattattacaacatatttagaagaagttcagacattcattttcggttgaacggaaacagaatcgattggagagaacgcaattgcatgagtgtgatgtgttatatatttttttcctggtcggaaaagcttattttatggattgagatatgctactcccagctctttatacatagaaattaaagttgaaggtaagcgcaactgaagtttggctttttgtctcgttagtgcttagggaaatgaagaaatttgcggatttttctattaaccagttttaagaatgtcacttattaatttacatagctaattttgaagaatgcgacacatccagcagaattagcagaagggagagatttagcgcaaataacagttgtgtgtgtgctgatacagaaagacgaagcggataataattaaatgaacatattagctttaggaacacaaaatatagtagtgtacacaaacaagatcgaaatgaacccctataaacagacaaaatggttgttttctcggtttcaatttcgttataatttatgtgaatcgcagagataaaggaacaactctaaactttactaaactttaaaatatgtattcattttttcacttgagaatgattatttaagaaacgacatttcaatccgtgacatattcaagggacgatacacattgcaaactgatttctgtattgagttgttgaaaggtaagctcataatgaaaactggaaatatgattttgtttgtaacaactctctcaacatacatcccttacgcaaccatattacatagggaaatattgttctggtggggtgagatgatgtggctcgataataggaagcaccttcaagctgcctcgtctcacctcatccgttgaatagccccagttattagatctaacattctcctaatgaaaacgaaatgaaagcaggatctcttcatcctacagacattatgcacatattaacaaatcgatgctattcctaattgatagttgttgtgatttcctaagcaaatataagaaaaccctattgatgaatgtgtttcctttgatttttagttggttttgtgcgtgaatctactaaggcggttaaactactttcattcgacgattatgagtgtgtcaatgcaacaagctgtagaatgaatggacgtggaaaaaatatatgcgcgatagatcccttttctgttttgaaagcttattctactcacacatgatgcatgatttatacagaaaacccattataatagatcgcagaaggatagaactagaaaccctcaatacatatagaaatcaacaagcagaaaaatggaatggaatccgattcctcgattttttcttatttctcgggaagcagaaaaaagtaataaagctgtaaggtatttgttaaaacattcaattggcatgtgttcaaatttggcatttataagatccgaacaacctcttactctcctctgagtggcaaaactgctgtcacagccgtcagtctgtactgtcaagaattttacgaacaacctcaaagtgatttgcacgagtggcgcaattttgggcttattctacgagtggattgaggtgaggaatttcggacgaatctgttctacggtcggtaaaggatgtacggaatcaaa

SEQ ID NO: 517 - DNA, 2670 bp, Aedes aegypti
atggaagccctccagaagcatctcggccagatcaaggtcccgtgcggcagcgacaacgtctacaaggaggagtgcgtctacagtttcgacaatccggaatctccgaccgggctttacgtcagtttgagtagctttttggggttcggagaggaatacgcgcgtctttatgcggagaaaagtggcaatcgggtgtttttgcatttgaagcgggaaaagattgaagtggcggaaccggcgcaggaaggaccggagaagaagattacgaggcttgcgattggagtggagggaggattcccatcggaacagaaaaagtacgagttccgggagcattataaggtggtggtgcttccggaaggggtgagttttgcgtacccggatcaggatttgcctttgctggtgacgaattcggtggagggggtgttgaatgcggaagcggcctctgtgaagcgggagcgggaacagttgaccggaacatgggacggagaagtccgacaggtttcccagcatgctgagaatctgttgcagttggacaatggaaggaagattccgccgaccggatggaaatgcgaacgctgtgatctgaccagtaatctgtggttgaatttgacggatggggcgattctttgcggccggaagttctacgatggaaccggagggaatgaccatgcgttgaatcactaccgggaaacgaactatccgttggctgtgaagctgggaacgatcaccggtgagggcaagggagatgtctacagctatcaggaagacgacatggtggtagacccctacctggtcaaacacttggcccattggggaatcaatgtgggtcagctggagaagacggagaagtccatggtcgagttggagctggacctgaaccagaagattggagaatggggcattctctgcgaaagtgccagcaatctgaagccaattgccggcccaggactgaccggaatgcgaaatcttggaaactcctgctatctgaacagcgtgatgcaagtggtcttcaccattccggatttcgttcgtcgattcgttgacgggtcgaaggacattttcgaaagcttcccagctgatccggccaacgacttcaacgtccaaatggcgaagctcggagtcggcttgtgcagtggcaaatacagtgtcctcaccgagaacagcatggacacggtggacagtccttccggaattgccccgacgatgttcaaatccttgattggcaaagggcatccggatttctcaaccaaacaccagcaagacgctcaggagttcttcctgcacctggtcaacactctccagaaacattctcgaaaccaagcggatccggcggacgccctcaagttcagcatcgaagaccgcgtcgaatgttgctccagcggaaaggtcatgtataatcgccgcgacgagtggtgtcttccccttcagatccccctcaatctggccaccaacatcgccgaggtcaagaagtacgaagaagacttggccctcgcagagaaggaaggtcgtcgcctagacccagaagctcttgtccgtccaaagatccccttgagcgcctgtctggacactttcgcccagccggaaaccgtggagcaattctacagcacggccatcaacgcgaaaaccactgccaagaagaccaccaagttggccacaatgcccgatttcctcatgctgcacttgaagaaattcaccctccgagacgactggacctccgtcaagctggatgtcgcaatcgacatcccggaaatcctcgatctggaaaccctccgcggaactggcaagcaaccccacgaggaagagctccccgaactggttggccaagccccctcgcctcctcccatggaccccgccgttttggaacagctcatggtgatgggattccctccggaggcatgcaagcgagccatcttcttcaccaagaactccggcgccgaagcggccacgcagtggatcatggaacatattgccgatgcagactttgcggcgccgttcgttcccccaggaaccgacaccggaaaatccacctccgccgccgctttcgtggcggatccgatgggactggaaatgctcatgggaatgggttttaccacccagcaggccaccaaggccctgaaggaaacgcagaacaacaccgaacgggccgtcgattggatcttttcccacacggatgaactgaacagcatggccatggggggagacggccaagagactgaagcagcagcggaaccgagcacctcgagcgcagcgcagtaccgcgatggaacgggaaaatacaaactggtggcatttatctcccacatgggcagttcgtcccaggtcggtcactacgtgtgccacatcttgaaggacggccagtgggtgatcttcaacgacaacaaggtggccatatcgcagaaccctccgaaggagctgggctatctctacctctaccagcgagtctaggagtccctggagtgatcggtaaggtattaagcctctcttgtttttcctcattgattacttccctcccgtaccgatataaaggagtagtttcgaaacaattacattacaatagctgcattattgatcgatttacattgcccgttgtggggattcttgtgctaacttatatactgttctctagaagcacggcaagcagataataaaatgaatcgtacttttgtcaaattg

SEQ ID NO: 518 - DNA, 2249 bp, Aedes aegypti
atttgtctaaagcattgaactgattggtcttctcgatgcaattatcaacattacccatttcacccttaaaagaaagcgcgcattctgaagaaacgtattttcttcttacagtttttagcacagttttattgcttcaggtagctttaaaaacttccgagaacaggaagaattggtaaacgcacagcacgaaggtacgatcttagttagaatgtaacgcagaaagaaaaagaagaaggtatacgatttgaatgaatgaatacttagtaatgaataaaatcagttgaaacactaactcagattcacaacaatcgcacagattaactattaaacaggtttaaccacaaatgaataccggtgcaataaatttgcaatttgtttgcggttaatctgtctcgtcagccaaaataaactgagctacttatcccaagccgaagttaacttcgtacagaatgtttacagggagcagaattttcgcatcttccttagtttaggtataaacatgatcatattcactcaccagtaaaactatgttgttgttagttaaaaactcttataacattgcgaatgggagaaaaacgtctctcactgcaacaattagctaaccagagcgtacgaatacagtctctttaggtgaggaaatctcaccacaaatgggatttccaacttcgatgataatactcgattgcgggattcgcattctcgcagacagatactcacgtgccggtggtgaatatttaaaaaggtagaaaccacccgaacaattattcagttacaattcaagtctcgatcagtgcagtaatgtttgcgtcgaaagtggttttactcttggttttggccattattgatggtgaaatacgcggtgcaccagtggagcacagattggaggatatactgatattcgatagtgatcctgatcaaccacccggtacggaggcggcgccagatcctaccaaacgagtgaaagttccttcaatctctcaagatgaagctgagacactgctgaaaggactcggttacaacgaaaccacaaccgatgagtttggagtatcgacaaggttctcgttcggcagagatgtctcattcgaagatatggtacggaactttcagcgatctgctggattggatgagaccggaaagctggacgatgacaccaaactaactatggcagctccgcactgtggtacacgaagcctggacaaacggggagatgatgccaaatgggacaaacggttgataagctacagaatcagggactacccatccggtgcatcgtcttcattcgttcggactatgatgaagcgagcattcgacgagtggagtaaagtgacgaatttggactttttcgaaaccagcgatcgcggagcggacatcgaagttaattttggaggaacctcccacagcagacgaaacagacgttgttcgtttgacagtcccactattatggcccatgcttactttccggaagatggggatcttcacttcaactcccgttacttcttcgataatccagaacatcgggaggacttcctagataccgcaatgcacgaaatcggacattctctcggcttggagcattcgaataccaaaggggctctgatgcaccccaccgacaacaatcgctacacggaaccgcagccggaagatgtgaggcggatacagaaactgtacgggaaaagacgaggtggccgagcgatcgaaagtggatcagcaccacgactctgcactgttaccaaatacgatgcagtggtcgccgattccaccggaagatggtccattttggctggtaaatactactacgatccggaagccagcaatcccaccgggaaactgatctccagcaaatggcccggtttgaccggggacattgatgctgcgttccggtatccggacgggcggacgtacttcttcaagggagatcgattctggcggtatcgtgagaaccggctggacgctggctatccacggaagatttccgaaggattcccgggactgccgaacaacatcgatgctgcgttcatcgattcacggaaacgaatctttgcggtgaagggaaatagctattgggtgtacgactcagatgaggataccaccccgtcttataggttaagttctctgggtttaccgaataatatggatgcggcggtggggacgggtaaaacgtttgttgtgttcaaggggaaagctttttataggtttaaggatggtaaatttagcgagtatgtaaataaatggatgacttgttgataaga

SEQ ID NO: 519 - DNA, 2641 bp, Aedes aegypti
cgctgattcggccgctggatgcttcagttgagttcgagtgattacggcttgaagatgttattcccggtgcttggtgtgttcctgatcgttggaggtggcagtttggctagcagtgttataccaaataattacaatgttcaattcagcactgacatccatagcggtagcgaatcgtacgatggaaccgttgaaatatgtttcaacgtaacggaagaagttgatcagcttgaactccatgcaaggaatctaacgatcagggttgtcgctctgaacaataaggacgaagtttatgagacgcaaccaagtgaattgccaaacggaaatctactattgaaattagaaaattcgcttccatcggggaactaccatctgaaggtcacttttagtggtaccgcgtccgatagcgatgccatgttcaaaggatcgtaccagaaaggtgacgatgaatctgtcgggcactatttgatgagcaaaccgaagaagtgtggctttctcgagagcccaagtgcattccctcatttcggcgaggaacacaaagcaactttcaaattgtcggttgctcaccacgagagtttccgagcgtggtccaatatgcctttggaagatcctccctcgcgacacgatcgagaagaatatgttgtttccagttttggagaaactcccgagatgcatgttttcgatgtgggattttttgtggctgactttggttcaaagcatgtcggtaaggtgactgtagttgcccgtgaagacatactggaatccttggagtatgttacatccgtgtgtcgcgatctggtgaagatcatggataatcatactgctgttgattacaacgtgcctgattacgcattgatcgtcgttccacgcaagttctctcattccaatttgacggagtttgagaggaaatttgtaaatgaaaaattcatgatgtacaatccggaagaggacgacttcaacaaattatctgcatttttgagatcagccggtaacaatctgatgcttcagtggttcggtgacatgatcgcgccagaagaagaaagacttctccaggcgttcgcgaacgtttacacttactacaatgcggagaagatttatcctcacgagttcatgatgatgcactaccaagttgatgtcgtacaaagatctctgttacgagactacgagagacccagcagtgtgctgaacatgttttggctgatggtgttggacagcaagtgggcgacggtgatggagaatttgtcgaagaacaggcaaccacggacattgacaactgcacaattatgttccgaggcccaaactttgtggaaagatgactacaatcttccggaaggtacaacactcgaatcgatcttcaaccaatggatgtatagcgacgaggagccacctgttctgaatgtgcaacgcgtttactcggaaggtaaagtgatcctttcgcaaaacggatcagagaaggttcttccgtacaatttcgcgacaaaatcatcgcactttgatcagctgggaccattccagtggctcactaccagcaatgaaactttgaagtttgacgttcctgaagatcattggattttgttcaacaaggaacaatttggattctatcgcgttaattacgatcaacgaaactgggaactgatcattcaagctcttcagacgaacgcttccagtattcatcgagtgagtcggatgcaattgttggatgatgctttgcattttgtgaagaatgatcagcttgatgtttcaatactgttgaacctactgacgtatttaaggaacgaaacgtgctatgatgtgtggtatgatgcgtatattgtgttgaaaacgtggtattatcgtgaaatggatccgccgcaggttgttaaggattttttcgtacacatcattgagccatattatcagagttttgcgtcgcaggatattaaccaatcgaatccgcaaatggaacttcacattcaatctaaaatagctgatcttgcctgttggtttggtaagaaggattgcttacagcaagctcgatctcgtttccaacaagccgtttcgaagaacatacctgttgagcctaactgggctcggatgacttactgttacggtcttcacaatgctagtgatgatgagttagaatggctattaaccaagaataagaagcaacattcttgtcctattgcttacttgaggtgcgttgataacgagaagcatctacgacgagcactgactgagttgaagaaaatgtcgaaccccgaaaaaatagccgctttcgtatcggcactagacgagaatggatttaaactgtttcactccctactgaaaaatgaaccggatctggtgcaagttttgggatcttcaacgatcgagcttgctctggagcgcgtctcaaagagcacaaagagttcaaaaacattgaagttgatcgaggatttggaggactctttggatctcccagtcactggtaaaggttccggatcacccgaaacaaatatctgggccaagccggaagctgtcgagtttattgaacgttatatggcacagcaggaaagtcgctaggtttaggtgtggaagcatttgacatactttgtggagaaaataaattatattctttattatcacataactgtcgtattctttcaaaataaaaactattttctct

SEQ ID NO: 520 - DNA, 3243 bp, Aedes aegypti
atgtctggcaataaatccaaaggctggttcaaatcggcgttcgatttcgaggcgccctcgtcgaaaacgccaacggtaaagcgaagcgcctctgtcatcaataaccaacggccatccccaaaaatttcccctacggaaccatccatcaagaagaccaaattggacaggagcaccagtttgggtcagaatgccacatctacggtgccgacggtgacggatcctggtcagattgattggtccattgatttggcgccaaaatcggtggccgatttggcggtccatttcaagaagatcgaggaagtccagcagtggttccggacgtacgaccgggtgaagggaaccgatcccgcagccatcctgttggtttcgggtccggcaggttgcggcaagagttccacgatcaaaacagtcgccggagaactgggatatgaggtttccgagtggacaactccggtcgatgtggacctgttctatcacaattacgacttcgaaggtgggacacgggaggacgttacctttagggaaagtcagagggaacagtttgattcgttcctttacaagacatctcggtattgttcgattttcgaaggcgcttcggatcagaaactgttactggtgaaggacattcccaatgtgtttctgcgagaaccggaagtgctgaaagcttctctagaagcgtaccaggaaacaggagcgtccccgttggtcttcattgcaacggacacatcaagcaagaagctagacatcgtttacaatctgtttcccccaggagttctacaggacttccgcattcatcacatcgcgttcaacagcgtttcgacgaccctcatgaagaaggccctgaagcggatcacttcgctgatggtcggaccggaaatgacccggcactatcgggtgccttcacaagacttaatcgacagcataattctgtcctcgcagggcgatttgcgcagtgccaccctgaatgtgcactttgcttctcttaagaatgcacctcggctggaaacggaagcggtttccggtggcagtgggacggtgctgaatacctccgggatgcgaagtacgaaggggagaaagaaggaaaccaaactcaagtcggtcggaggcgatgggagcattacgctgatgcacgccctggggcgggtgttcaatccgaaattcgaggactcaaacaagttccaccactcgccggaggacctatccgacgctttcgtgtcgcaaccgggagcgatgatatcgctaatccactcgaactacgtcacgaggttcaccgacatcgaggacatcgtcggggctgcggatgtgctgagtttggccgatgtgatcatgagcgacggcttccgggaagaccagctgaccgggcatggactgaatttgatcgtcagggggatgatggtgcacaataggaaaacggccagcgggtggcagcagatccggaagaagaagacgttcgataaaccgagagaattcggagtagaattccccaccaccaggatggagcaagttcccattgcggtacggatagagaaggaaggtaaacaggtgttgcaagccatagtctctgttccgacgacatcaagcttccagtcgattatcgctcgagtgcttggaaggatagaaaacgggcatgaaaagattgataaaatctacaccgggagtctatcaatggagcagaaggatctgtttgaagtcgatcaaacttctgttcttcaggacgcttcaagagtgattggaacgtgcactaaagttttgtgtagactgaaatcaactctcgagccttcgaaacaaccaaaaaatgcatttcatcaaatgatgcaaagtgcttcggctgctgtatatcctgagaagaaggtggaaaaggacggtcgagatcaactctacaactgcgttgtgcaatatttaaagacgatgaatgcaggattcggacgatttcagaaagatgacatgcaggctttcatgagtgtgattgtttcggctctatggtatctggatggccaatcagaaaaaatagcttcagcgccaggagttcgttcagtaccaaaacggttctgtttcacacctgaaaatggcgaaacattccgtgtgcttacacatggcaacatgagaaagaaacctctcccacgaatgacaagagatgaaatgattgttgtatttgaccgcttagacgctctatgcgctacaggtattacaaaatcaaaatcgtggtcagaagttcgatcggatgtggaaggattacgtgaaaccttcgcaggttatatcaattacctgaatcaagtggagaatcgagcagaaaatgaaaccattgatgattctaaactgcatgacaacagatctctgaaaactgtacctggtagcagttcccagtctgcattagcaaaacttatgtataaaccgcttcatcagtttctgatccaagaagaaccgtgcactcccgtgaatttgatcctgtatgctccggttgaaagaaaagcgagatacaaatatattcaaggactatgttttgaattcgatgtaaacgtctatcgttcattcaaaccgaatgccacttttgtgtggaggctgccccaagagcgatcagaatctcagatagcaaacacaatccatcgtttagaatcaggtttggctgaccgtatcagagttgacaaagcaaaacgggcggaagaagcttttggaggcctagcttcgtggaccgacaaagatttaaatgattttttgactatttgtaaagatgataaagacaccgatgatgctaattctgaagacctttcggacaccgtaaaaggagttcagctgcttttgaatgacggccacgaagttgaagacgttatccttcttcgagatcaagaacaagaagctcgtgatggtaaattcaacaacttttggaaagctgttgaagctgtgatatccgagaacgatttagctgttgctcaggaaaggcgacatgggaccactagttggatatctcctctttgtgtctccctacgcgatctgatggaaaaaagtgaagagaaaatgaatcaactttttccagaatcgttgatgaacaatgtcccctcaatggaattcttccgtcttcaattctctcccagaaactcacgtactaactcggccaaacgatactacagcagatttgacataaaatatggactacaaatacgtactttgcgaaaatcacatccggatcagcactatggagcaaagcagttccaatacatgaaaattatggcaggtacgttttggtaa

SEQ ID NO: 521 - DNA, 2040 bp, Aedes aegypti
atggtcaatctgaacctgggagggaacggcggaagtggaaacggcaactcggacaacggccaggcatatccgccggtgcactatctgcacgagttgccccaggccgacgaggagcggctggagaggatcttcaagaagctcgaccgggacggcaatggccggatcgatatccacgacctgtcggcggccctgaaagagtttggcctgtcccaccagtatgcggagcgatttcttaagcaatcggatcaaacggaaagcggggatgtcggcctggccgagtttattcattatgtgcgggagcacgaaaaaaatctgcggctacagtttacgcacctggacaagaacaaggacggcaaggtggatctggacgagctgatattggctttcaaggagctgggtgtcgaaatcgataaccaggaagcagcgaagttacttaaaaggatggataaagatggaagtttaaacattgattatgacgagtggcgagattttctgctgttagcgccgtcttcggatcttcatgaactcgtcaagtactggaggcattcaacctatttggacattggcgaagatctgaacgtacctgatgacttcacgcagagcgagatgcagagtggcatgtggtggcgccatctggctgccggcggtttcgctggagccgtgtcccggacctgtacggcgcccctcgatcggctcaaggtgttcctgcaggtgcaatcaaccaaacagcgaatctcagactgtctgcagtacatgctgaaggagggcggcgtgcagagcctctggcggggtaacttcatcaacgtgctcaagatcgcgcccgaatcggcgatcaagtttgccgcctacgaacaggtcaagcggctcatccgaggcaacgacaagcggcagctctcgatctacgaacggttcgtggcgggagcgtgcgccggcggagtgtcccagaccgccatctacccactagaagtattaaaaacccgactagcgttaaggaaaaccggacaatacagcagtatactggacgcagcgaccaagatctaccgccgcgagggtcttcgctcgttctaccgcggctacattccaaacatgctcggcatcataccgtacgccggtatcgacctggcggtgtacgaaacgctgaagaagaagtacctcagccaccacgagacggaacagccgagtttctggctgctgctggcgtgcggtagcgcctccagcacgctcgggcaggtgtgctcgtacccgttggccctggtgcggacccggttacaggctcaagccgtgacgatcggttcgcagaacccagccgacgggatcgccgccgtcgagccgaacatgacgaacgtattcaagcggatactgcaaacggagggtcccctggggctgtaccggggcatcacgcccaacttcatcaaggtgctgccggccgtgtcgatcagctacgtggtgtacgagtactcgagccgcgccctcggcgtgaacatgacgtgatttggtgcgcccgaagcaacccaaaccaacgcgatcagcatcagcgtcccgaatgctatcgttgagcagctgtcgctaacgctgcttccgccgacgccgcctctgtcggcatcagtggtggcagcacttctaaaactgctactttcactacaacagccattgttgctaatgttactagccgctgtcgtcgccgccgtctcgctgcatcatcaccatctcgtcaatcgtcatcccggacatcgatcaaaccgtggtctcgacgaggcccagttcgattccttcagctatttattaaccgaatcaaagttttccgaacatttgcgctttcgaacagaaaacggaacaatgagcagaggacacagctttattcaatttcctactcccccgatcattttgatttattaacccctttttactcttaggtgtacataatgcaatttaacttatttcaacgctgattcaattctttcgtttattcataagtagtagcaacaaattgaaagccaagttctccaaaatgtaatacttttagtaaaagcaatctataat

SEQ ID NO: 522 - DNA, 2605 bp, Aedes aegypti
gtaacagttaaccaaaaaccagcaagcgagttagatcgaggcaagcaacgtgaaatattctgcaagtgcaagtgcatcctcagtgcaaaagtgtgatagttttacaagtgaaaagttgaaagttttacaactttgctattgaattttgtttttggagaaaaagcagttaaaaacaagcaagatgccggaagccgccgccgatgtggaaacctttgcgttccaggctgagatcgctcagctgatgtcgctgatcatcaacaccttctactcgaacaaggaaatcttcctgcgtgagttgatctccaactcttccgatgccctggacaagatccgctacgagtcgctgaccgatccctcaaaattggacagcggcaaggagctgtacatcaagctgatcccgaacaaggaagccggcaccctgaccatcatcgacaccggtatcggaatgaccaaggccgatctggtcaacaacctgggaacgatcgccaagtccggtaccaaagcgttcatggaagccctgcaggccggagccgacatcagcatgattggtcagttcggtgtgggtttctactcgtcctatctggtggccgataaggtcgtcgtcacgtccaagagcaacgatgatgaacagtacgtgtgggaatcgtccgctggaggttctttcaccgttcgccaggacaccggtgaaccccttggccgtggaaccaagatcgtcctccacatcaaggaagatcagctggaatacctggaagagagcaagatcaaggccatcgtgaacaagcactcgcagttcatcggatacccaatcaagctcctcgttgaaaaggaacgcgagaaggaagtcagcgatgatgaagccgaagagaaggacgaggaaaagaaggaagaagacaagaaggacgaacccaagatcgaagacgtcgaggatgacgaagaaaagaaggacaagaagaagaagaccgtcaaggtcaagtacaccgaagacgaagagctcaacaagaccaagcccatctggactcgtaatgccgacgatatctcccaggaagaatacggcgagttctacaaatcgctcaccaacgactgggaagaccatcttgccgtcaagcacttctccgtcgaaggccagctggacttccgtgcactgctcttcgtgccccgtcgtatgcccttcgacctcttcgagaacaagaagaagaagaacaacatcaagttgtacgtccgtcgtgtcttcatcatggacaactgcgaggaactgatccccgactacctgaacttcatcaagggtgtcgtcgattcggaagatttgcctttgaacatctctcgtgaaatgttgcagcagaacaagatcctcaaggtcatccgcaagaatctggtcaagaaatgcctggaactgttcgaggaactcgctgaagacaaggaaacctacaagaagttctacgaccagttcagcaagaacctgaagctcggcatccacgaagacacctccaaccgtcagaagttggccgacctcctgcgcttcaacacgtccgcctctggagacgagtactgctccctgggcgattacgttggccgcatgaaggagaaccagaagcacatctacttcatcactggcgaaagcgtcgagcaggtcaagaactcggccttcgtcgagcgcgtcaagaagcgtggattcgaggtcatctacatgactgaggccatcgacgagtacgtcatccagcagctgaaggaataccagggcaagcagctggtctccgtcaccaaggaaggcttggaattgccagaagacgaggaagagaagaagaagcgcgaggaggacaaggccaagttcgagaacctgtgcaaggtcatgaagtccgtgctggacaacaaggtcgagaaggtcgtcgtttcgaaccgtctggtcgattccccatgctgtatcgtcacctctcagtacggatggtccgccaacatggaacgtatcatgaaggctcaggccctccgcgactcctctgccatgggctacatggccggcaagaagcacatggaaatcaaccctgaccactcgatcatcgaaaccctccgccagcgtgccgaagccgacaagaacgacaaggccgttaaggatctggtcatcctgctgttcgagactgctctgctctcgtctggtttctccctggatgaacctggagtgcatgcctcccgcatttaccgtatggtcaagctgggtcttggaatcgacgaggatgaggccatgagcaccgaagaatccgctccggctgccggtggtgatgccccaccactagtggatgacgccgaggacgcttcgcacatggaggaagtcgattaagcgtcgatctctcttccccacactagcgctagattaatttattcaaattgacgcccccggttttaactaatttcaaacaggatttttagtaagcgtgggtataacttttacgttactttccaatttttgttccgcgttctagcggctgcaaagaacaacaaagatgtacattcttgtcatttattagcagttaacagacgaatacgcattcgaactgattatctttaacaaaaaagtgaattttcaaataaatcgtttgtaaaatgtaaaacttaa

SEQ ID NO: 523 - DNA, 1259 bp, Aedes aegypti
ttaagagcactgccgatctttcacttttttcgtctctgaaatttctagaaacgtcagcgcaagctgccaccagctctcggttgtttgcctgtttctctcttcgctgatcgtccgtcgctcttctctctccacagaaatttgttccgcacattcgctgtcaagttgtctttccagaaagtcgcgtggtggaagtcaagttcccgttcctcataatcggacagagattttccggttcagtgaaaagttataagaaaccgtttcccccttgcggatcatcaatttcatttgctgaaaagcttgtgttcatagaatatcttcaatcttcctcaaaaaatggcctccaagcgtttgattcctctgttggaccgtgtgctggttcagcgagcggaagccctcacgaagaccaagggcggaattgtgttgccggagaaggcccaatccaaggtgctggaaggtacgatcgtggcggtcggacccggtgcccgcaacagccaaactggccagcacgttccattggccgtgacggtcggcgaaaaagtcctgctgcccgaatacggcggcaccaaggtcgatctgggagacaccaaggagtaccatttgttccgcgaggcggacattcttgccaaaatcgaatagaaccgggagtgcggtgatgaccgtggtcgtccaaggaagaaggcgaatttcatccgagtacgacatccgacgaggaagggagaactggtcgaggtacgactttgaagctttttaattgtgtaactctagaacttaagggcgagggagggcgtctttttgttttcaaaaggactcttagaatgggattgttcggtaatcgttccgtgtgtgattgagatttaggttgaatgagtagagtctcctcggtaacacgatcacataaagcatttgcatttaaatcgattgagctgctgtgacgtgttgctccctatctccgataagttttccaatcgtgtggaccaccaaagattggcaggccaaactttgctgctcctttcatgattgaacttttcctctgtaaatcttatggaggagacttctggagatccagaatttcttctgtataggtgtcgattacttgctaggttaccgatacacacttgaacggatggatttcccgtctcgaagataggtttccgaggaaagattgtgcgaaagagaggagattgaacatcgactaaattagggctagaagtacgattctattagtttattttctgttaaataaaattaacaaaaaaagt

SEQ ID NO: 524 - DNA, 3185 bp, Aedes aegypti
ccgctcggttttgcatctgcgggcgctccagcgcatatcagagcgtaatgcaccttttgaatgtggtagtgaccgcctttacagttttgttcgtcccgcagaaagaatgaaggcactctatctccactagtttgacagaacaatcccagctttcgtacatcctacatgtatagtgcaagcaaccagcacgcgactttcgtcctataggccccataaatcagctcggcttcgagaaagcaagttcaagatacagcagaggtgaagttgaatatcgccaaaaacgcttgcttaaactccgcgacgatattattgactacagtgtgtcgtggtcgaaaatagcctctttagtttcagtcggtcgtccatcattctgcgtgagctgtaaaaggtgcggtgtgcatataggaagattacagtccccagaagagtgaaagattacgcaaagatccaaacaccagatctgtctgtctgttgggaggaagtgtacaccgaagtttccgaacgaaaaattgattgaattataatcgatccattgtgtcgggcggtggcacgcgagtgatttccgattggtgcgagaaaagaagaaagataagtcacgaaaaagtgccccaataaagagcagtgcattagaatccctgataagattgataaccggagaatcggtcgtgacaaaatgaaatcgttgaccttggaggaagtgttgaatctttgcggcatggtggcctactgccaggagggcccaatgcatttgaagcgttgctcgacggagaagcttcgtgaaatcttcaccaaatatgccacacaggaagtcaacggtgaactgtacatgaccagcgatgacttcgtgaggggtttcctcggacaatcatataatgaggaatcggtcacactgttggccggtatcgcagacaccagcaaggatgggctgatctcgtttgccgagttccaagcgttcgaaggtctgctctgcacaccggacgccctgtacaaaaccgccttccagctgttcgatcgcaatggtaacggttcggtgacgtacagtgagtttgtcgatgttttcaaaaagacagatctgcacgctaaaatcccgttcaaactggacggtccattcatacagctctacttcggcaaggaccggcagcgaacgatcaactatgcggagttttcacagtttttgcatgactttcacgaggaatgcgcgttggaagcgttccgaatgaaggacacctcagggtccgggttcatctcggcactcgattttcaggatattatggttaatgtgaagaaacacctgctgacggccgacgtcaaggataatctagtggcggtcacagaaggacacaaggtcagctttccctacttcatggcatttaactcgctgctaaacaatatggagctcatcaagcggatctatctgaacgcaacgggaggaaatcgaacggagcccattaccaaagacgaacttctccagtcggcacaaaccatgagccaaatcactccgctggaaatcgatattcttttccagctgacgggagcaatccatcaaacggggcgaatcgtgtacggcgatttgagcagtattgcaccggaacactataccaaacatatcacaactaggctaacggaaattaaagccgtggaatcacctgctgatcggtcgatattcatccagatgctggaaagcacctaccgcttcacgctgggctccgttgctggagccgttggtgctactgctgtctatccaatcgatttggtcaagacgcgaatgcagaaccagcgaactggatcgttcatcggtgaagtggcctatcggaactcgtgggattgttgtaagaaggtcatccgccatgaaggctttctcgggctttaccgaggtctggtgccgcagctgatgggtgtggcaccggagaaagccatcaagctgaccgtgaacgatttcgtgcgtgataagttaaccgacaagcagggtcaaattccacgttggggggaaatacttgctggtgcttgcgctggtgggtcccaggttattttcaccaatccgctggaaatagtcaagattcgcctgcaggtagcaggtgaaatcgccggcggagccaaggtgcgagcctggaatgtggttcgcgagttgggactctttggcctgtacaagggtgcccgtgcttgtttgcttcgtgatgtgccattttctgccatttatttcccaatgtacgctcacacaaaagctgcctttgccgatgaagagggctacaatcatccactaacactgctggcggccggtgctattgccggtattccagctgcttccctggttaccccggctgatgtgatcaagacgcgactccaggttgtggcccgtacgggacaaaccacctacagcggggtgatcgatgcagcccggaaaatcatggccgaagagggaccccgtgccttttggaagggaacagttgcccgagtcttccgctcatcacctcaattcggtgttacgctagttacttatgaactcctgcagcgaatgctgtacgtcgactttggcggttcgaggccggccggttcggatgtggcgcaggccaaacaggaactgtccaaggtgaacccggaccacatcggtggctaccaggcggccctaccgatgctgaatggaatcgagaccaagttcggcttgagcttaccgcggtttgcgtcgaccttgaaggtgccctcggccaaacaagcttcctgaaacctgcttggatggtttaggggaactgctagcgacggtggagaggatggccgccgcggaggaggtaacaaacgttggagtaacttcttctggtagcgacagaacttggaggtgtgactggactggacgaacgccaacagtgcgcgaagagtatttatcgagatggacgagtgcgtgtgtggaatgtgttgtgcgctgagagctacctggctcggtaggaattgaagttacaatatggaggaaagcgtgacgcacgccggatgctattagtctagaaatgttatagagcgtgatagttctattttaattcactagttcacaaaacgtccgaaatgatttagtgattttcgttatcaatcatttgagtgagattaatcgtttttaaagtttaaattttgtacaccggaaaattgacgaaaaagatataagagagaataaagtgcatttgttttatttttacaaagaa

SEQ ID NO: 525 - DNA, 1042 bp, Aedes aegypti
gaaaagaacagaaaacagttgatgtaacaaacgtgatcgtgaattgatttgtgaaattttcgaatttattgctctaaattacgaacaaacgaaataatcatcagccatggaggaatacgccagagaaccgtgcccgtaccggattgtggacgattgtggtggtgcgtttgcgatgggctgtataggcggtggcgtgttccaggcaatcaaaggcttccgtaatgctccttcaggtttcagcagacgactggtcggcagtttgaccgcaatcaagtcccgctctccggttatcgcaggaaatttcgctgtctggggcggtatgttcagcacaatcgactgcaccctggtccatttccggaagaaggaagatccgtggaactcgatcatcagcggggcagccaccggaggaatcctggcggcacgtaatggcgtcggcgccatggcaggcagcgccatcatcggtggcgttctgctcgcgttgatcgaaggtgtaggaatcctgtttacgagaatttccgccgaacagttccgttcgcagcctatcgtggaagacccctcggcactgggtgacccttcgcagaacgctggtgcggcggcaccgtcctcatcaatgccattcggtttcgggaaagataaaggattcaattagagtggaagcttgaccttttccatgtgagagtggtgaatatgccagatagaacgatgactgcgagcgcgtttatgtgattgtgtgatagattctagtgaaactgtataaggtaacattagtggggacaagaaaagtgttctgaaaacacaccgaacttcggtagaaccggatgccgataaaatgcaactacgaacgaaacgatcgggcggtgtcattggtggaagaaatccttctacaagtaatttcttctcataccaagtttctcgatataatggaatggtatcgtcaacttttttctgtttctttcagaaccggaagagcaaaattagacctagtttttctgtatataaaacctaagagcaaataaaaattcgattatttcaaacatgaaaa

SEQ ID NO: 526 - DNA, 942 bp, Aedes aegypti
atcatcagccatggaggaatacgccagagaaccgtgcccgtaccggattgtggacgattgtggtggtgcgtttgcgatgggctgtataggcggtggcgtgttccaggcaatcaaaggcttccgtaatgctccttcaggtttcagcagacgactggtcggcagtttgaccgcaatcaagtcccgttctccggttatcgcaggtaatttcgctgtctggggcggtatgttcagcacaatcgactgcaccctggtccacttccggaagaaggaagatccgtggaactcgatcatcagcggggcagccaccggaggaatcctggcggcacgtaatggcgtcggtgccatggcaggcagcgccatcatcggtggcgttctgctcgcgttgatcgaaggtgtaggaatcctgtttacgagaatttccgccgaacagttccgttcgcagcctatcgtggaagacccctcggcactgggtgacccttcgcagaacgctggtgcggcggcaccgtcctcatcaatgccattcggtttcgggaaagataaaggattcaattagagtggaagcttgaccttttccatgtgagagtggtgaatatgccagatagaacgatgactgcgagcgcgtttatgtgattgtgtgatagattctagtgaaactgtataaggtaacattagtggggacaagaaaagtgttctgaaaacacaccgaacttcggtagaaccggatgccgataaaatgcaactacgaacgaaacgatcgggcggtgtcattggtggaagaaatccttctacaagtaatttcttttcataccaagtttctcgatataatggaatggtatcgtcaacttttttctgtttctttcagaaccggaagagcaaaattagacctagtttttctgtatataaaacctaagagcaaataaaaattcgattatttcaaacatg

SEQ ID NO: 527 - DNA, 939 bp, Aedes aegypti
tgaacattgcgtaaacattttgcagatcttgcggaaaaatcaaagaattttagataaattagtaaaaaagattagtgtttatcaccattaaaaatgttcctgagacctctggagatgctgtccaacgtgctgcgggtggcttccaagcgaaccatccatcagagcgcggctttgctcaaggtggaagaccgcaaggccatgctcgcttcgcttcccggcaaggacgaaggaacgattggcgaacgcgctgtggacatcgattccctgattaccaaaaaagagcgtatctttcccgatgccaacacgccgaccaccctatttaacgggatacccttcaacgagattccgatctgtaacattagggtgtcgccaaataacaccatcatcacgatatgcgacgccaaggggacgccccagttcatccgctcttgcggcatcgaagggttcaagaatacccgcaaaggaacgaacattgccgctcaagccactgccatcagtatctgctcggtgggtggttcgaaaagatgagattgaccactccaagcaatgaactaattagaatgctctattttacagaaagcgatcgaacgtgggtacaagcaagtacgggttacggtacgggggttgggtccgggacgaatggtaatattataatatcgaaaattgtggaattaccctgaacccatctctttttttcagtctgctatcaaaggtttagaaatggccggtatgaatatcgtttcaattacagatacgactcctgtgtcgtggaacccaccgcggccccggaagcaacgcaagctgtagataaggtattgcgtagtttatttgttacctcgttgcagaatacgcattctattgtacagatgaaaaactagcagcttgcttgtgtgtgacttaaaacatatcgaaagccatggcaatgtcatctttcttatg

SEQ ID NO: 528 - DNA, 739 bp, Aedes aegypti
cgcctgtctgtcagattcgacacgacatttgccgtcttctcgcaaagtgtggaaattttaggaggaaaagtttctttcaattttccgtattcaaaaccttaaatttacccccaaaaaatggcagatctcggtgctccagttcgtgtttccccgctgatcaagttcggtcgttggtcgttcctggccatcggtgtggcgtacggagcctaccatcagcagcgtctggccaagcgtgaagtcggtattcgtgaggtcgaagcacagcagaaagtcatccgtgacgcgaagttggccgaggaaaagaaacgccagcaagcagaggaagccaaggccatcgcagagctgtccaacccggccaagaagtaggaatctgcgagaatttattgttagtcccttattttttaaaactcgtatcgaagaacgaattcaaacaaattgtaatctaattttcaagccttccaatggagggagaaaccaacaaacgaaactgtgaaaataaaggatactaataaattcctagcggaaagttgcacaagtttttattttctctttgacggtgtttcatggaaaatcaagcgagctatcgagatgttgttcctgaaccattcttcaaaagaaaccaatttgggttcctgagtcttaactgtcatttcaaccggccttaactacaaaacgagaccaactaaggggacaataagcttggtcgtgtggaaaaacaaaacgtcaaattgggataaaa

SEQ ID NO: 529 - DNA, 332 bp, Aedes aegypti
aaaaacttctacaacccacttctgttggccgtggattgaagtcctgtgagttttattgctcggaaatcaacgatgtggttcgaaattctgccctcctttggcatcattacggcgatcctgtccgttcctggattcgcaatgtatggattgcatctgttgacgttggacaatgcctaccggcgtaacaccgaccagagatgggagcgtatcatgtatgtccgggatatgagactcactggcaatccctacaattctaacggattggagtctattccagataagtaaaccaatattcagaaatgtagataaaacggaatcttctatgaacacaa

SEQ ID NO: 530 - DNA, 1356 bp, Aedes aegypti
gattcccgttttctttcgtccacatgcaacgaaattcctttaagagcttcacaaatttagtgcgctgtttcacgctgaatataaaagcttcgtgatttatgtaagaattagtagaaaattgcagaaaaatgttccggaaacttgttcaatcgtcagctcacatgctgccgagaggttacataaatcagtcggctagcggaatggttggtgctagccggtactcatcaactgcggcagatcctgatagtcccgtcgagttggaagagaatcccttcgctaaagatcgtgtccagtgcattctgtgcaggcacaacataacaccagactacaagaacgtacaactactgtcgcagtttcaaagtccctacacgggacgaatttatggcaagcacataaccggtctgtgccgaaggcgccaagaacaggtggagaacgaaatcatcaaagcgcagaatgccggatttatgccgacttaccataaggccgtcgagttcctagaagacccgaagctgttcgatccagagagacccgttcgaccgcataaatattaacctggttctaatggttttgagaaatagaggaaattataatacaagtaatggatcagttggatttttcgaaatattccaatgcagagctataaacctttgccttcgaacgatgagaaaatttgtaatttgaaaaaagtagctagaattacaaaaagtatcaacagaaagtttcacatatagaactgaatcaatctggatccagaaactcctgggtctcgctatcaaagtttaccaaatcaaaaggtatctggagcatgttcagcaacgattccatatcaccggtgccgcgtcgttcctgtagatcattcaaagctgcaatgcatccgttcctccatactgagatgctttccttaacttcctgaatttgtagctttatattcgagggtggttttgaatctggcttgtcttcagttggtttagtttcaacacgactatgacttggttcctgttccacacagctatcgatttcttccggttccgtacacatctccacctcgtccatcaactttcttcgtttgatgttttgcagttccttcttctgaactatttttttcctccagctttgactcaacgatagacgtgttttcttggagcttgacctgacggcgatgggtgttgtcaccggtgctggtgtttcaacgttgtcctcctggtcactagtgtcattcaagcaagtgcttttaataggccgcatttgattggcagtcgggttggggctgctactcgccaaaacgttctcgtcaacggcatggctgggaagcgctgatttgggtgtactcaatgcttcctgcaaatattcaaggaa

SEQ ID NO: 531 - DNA, 779 bp, Aedes aegypti
aaaaaagtacgatcgtcgtcctgaactggtcgtccctctgttctaaacgttgtttattcctgcattagcattccacgaaccaaggcaaaagtgtgtgccgagtgaaaactgggaggagttgcatcagaaaatcatagatcatcctttagtggctcgaaatccagtagtgctgtattgactcaactctaacagcattgtttacttccattccttgagtgagaagcgtttccattttccgaacaaagcaatggcagagataaagccggaactcggggaaatcgacagcgatgctgaacagaactattccctcggcagtaacgttgatccgaagaacatgcaagaattgaccatctacgttcagaatctcctccagaatgtgcaggacaagttccagaccatgtcggaccagattatctcccgcatcgacgacatgggcactaggatagacgacctcgagaagagcattgccgatctgatgcaacaagccggcgttgaaggtgccgagaagtgaggactgccaggattcggatgggaacaaaaggtatattgtactggaagtgatctgtaatcagctaacttataggtttatgattagatttatcgcaagcatgatttagtttcgggataagttttcctctcgtcccgtatcagaacgtgtgacagtgtcatatttgcgaaaaaaaaaaccaagttttcctgctggttagggtatcacggtgtgtcttgaaccgttgttaacgaataaaatggccatcaatcagtatcgaccattcgaaaga

SEQ ID NO: 532 - DNA, 1425 bp, Aedes aegypti
ctcagatttttacctcctaattttccatagtgatgccacccctgcgttggccgttacagcaaaactggccgctgaaacatttcgttttctatcgtttttcttcgattcggctttttgcgccacattcaagttgaagaaccgtcgggataaggaccagttttttttaatccgctgtttgaacacaattcttgtgcgattccaccgtaaatttcttgaaaagacaaaccagtttcataaagcatcaaaatgtcccaaaaaggatccgccaaagccaagacaacgaagcaaacaaaatcgtcccgcgctgggctgactttcccggtcggaaggatcacgactgccctgaagcgtggcaaatacgccgagcgcatcggaacaggtgccggaatctatatggcggccactctggaatacctgttggccgaagtactggaactgtccggaaatgcagcgaaggacaacaaaaagagccgcattgttccacgccacattcagctggccgttcgaaatgacgacgagttgagcaagctgctgagtcatgtgtccatctcccagggcggagtgctacccagtattcactcggcgttgctgccgaagagtaccttgatcaaaaaggcgtctgcagccgggggcgattccaaccctagccaggagtattgaggaggaggccatccccaccgccgcagagagacagagcagagcttgcgttacggcggaatcatcacagtaccttcctttaggaccatgacaagttacttattttaagattaggaacgcgtgccactggcactgttagtttgtaagacttttgattgaatttgccgctttcgagattaaatatgtattttaacgattaccaattttctgcgtacaattttttggctagctatattgggataagttcaatgtaaactcttttgggaacttcacagctggtctcgtcatagagacttggtttctattctaatgcaagcctctaaaaagttttttaaaggaaggtgtcttaagtcaaccaaaatggtttctaaagtcacttgctatgcttgcagtgaaccctgctgactaattctagaggttcataagaaaccttcagataccattacacgactattccacagattcttcaggaatttccttgagatctataaattctgttagcagtgattcatggggaattacttcagaatttgctccagggaatccttaagcactccaacgcttgtacctcctataatttccacaagaattactgtgaatatttttccatacttgttactataggagctcttccaagcaaatcgacaaagaatcattccagagatttcgaaaaattcgattaggaattttccaggaagatctacatgaattcctatgctaatttctctcgtttccctttcagtcccatacggattccttcaagaattc

SEQ ID NO: 533 - DNA, 1320 bp, Aedes aegypti
atgatgactgaaacgctgaattctaataatcatctcagccaaaagggcgagaacaaaatggatgacatgggatggaaagccaaactcaaattaccgcccaaagataatagaattaagacaagtgatgtaacggatactcgtggtaacgagtttgaagagttttgcctgaagcgagagctgctgatgggtatcttcgagaaaggttgggaaaaaccgtcgccaatccaggaagcagccatcccgatcgcactagtgggtaaggacatcttggcgagggctaaaaatggtaccggaaaaacgggcgcgtacagcattcctgtactagagcaaatcgatcccaccaaggattatatccaggcattgatcatcgtgcccactcgtgagctggcactgcaaacatcacagatttgcattgaactcgcgaagcacatgcatatccgggtaatggtgactactggtggaaccaatctcaaggatgatattatgagaatatatcagaaagttcaagtgattattgctacgcccggtcgtattctggatctaatggacaaggaggtggcaaatatggccaactgccgtatgttagtattagacgaagcggacaaactgctgtcgcaagacttcaagggcatgctggatcatgtcataatgaaattgccaaaagagcgccagattttgctgttctcggcgacattcccactgagcgtgaagaacttcatggaaaagcatctgcgcgagccatacgagatcaacctgatggaggagctcaccctgaagggtgtcacacagtactacgcgttcgtccaggagaggcagaaggtgcactgccttaacaccctgttttccaagctccaaatcaaccagtcgatcatcttctgcaattcgacacaacgtgtcgaactgctggcgaaaaagattaccgagcttggctactgctgttactacatccatgccaagatgcagcaggcacatagaaatcgcgttttccatgacttccgatccgggctgtgccggaacctggtctgctctgatctcttcacgcgaggtatcgatgtacaggctgtgaatgttgttattaatttcgatttcccgaaaatggcagagacctacctgcacagaattggccgatccggacgtttcggacatctcggtatcgccatcaatctgatcacctacgaagatcgatttgatcttcaccgtatcgaaaaagagttgggcaccgaaatcaagcccattccgaaggtgattgatcctgccctttatgtgcctcgaccagaggatcaaaatagcacacaggaagaacagaacattagcaaataa

SEQ ID NO: 534 - DNA, 1222 bp, Aedes aegypti
tgctcgttcagtgcagtcgtcgggtgtgtgattagaaaaagttctgtttgtgcgaggcaccagttccggacagattagcagcagccatttttccctcccaaagaagagaggtgtgcgtgtgtttaccagcagaaagaagcggatttctgcccccaaagcgataaacgattgtgaagtcgacttagccggaaagaggaatactatctagatagcgaaaaatggctggaggaaaagctggcaaggattccggaaaggcgaaagccaaagcagtttcccgctcggcgcgcgctggactacagttcccggtgggcagaattcaccgacacctgaagaaccgcacgaccagccatgggcgcgtcggtgccacagcggccgtatattccgctgccatcctagaatacctgacagctgagatgctcgagttggccggcaacgcctccaaggatctgaaggtgaagcgtatcacgccccgtcacttgcagcttgccatccgcggagacgaagagttggacagtctgatcaaggcaacgatcgccggcggtggtgtcattccgcacatccacaaatcgctgattggcaaaaagggcggccccgaataaccacctccccaccaccatcatcaagattactaaacactaaatatacacaaagcgaaaacgcgcgccccccctggaagccagacgtcttatatacaaacacaaacacacacattttctgtaacagtttttgcacaagtaagaaatcgcgtcgacacagcaacagagagaatctatatcatagtagaaataataacgtttaaatgatacacatttaacaattgaacaggacattctcgtttgttgtctaatgtttagtatcgttagtgcaaaccgcagttgtttcttcttaaattcaattctcgaacggcggtatcctacttccaaagggtagtatacgatctccttgcttcaccatccttgctattgtattttcctccttcgccttttttttctcttctgtgttgtgacacccggggacgcggatatgtgtgcgcgcgcggaacagcaagccgtttaagcaaaatatcgtcgtcgtgtttaactaatttttaacgcaaattgagagagaaaactaaaatgagagaaaaatctaaaagaaaccctagagagtacataagttaagtgcgtttttcttattatattttcgatgaaaaataataaaattttactattaagaaaagaaa

SEQ ID NO: 535 - DNA, 1835 bp, Aedes aegypti
aaaaaacttgacaaaattttaactttttgcagtggaattagtcactgattcatattttgttactcggaagtctgtttcggttaaagagtagttaaaagttgttcaatctcggctcggtaaaatatttcctagcaaggcggtgtagaaaaaaagcggcgcagccaaaatggtggacaaaatcgaaatgagcctggatgatatcatcaagtcgcaaaaatctcaacgcggcggaggtcgaggtggcctgaataaatccggtggacctccccgcggaaatgtaaaccgtagccgtaatggtggcggaggaggattccgacagaaccgcggtggcccaatgggaggtggcgttcttaaaggccggaaccggggcggaattcagcgaacgacgaaattctcacggggtgacgtaaacagcgcttggaagcatgacatgtacgagggagcccgtaaaaaccggctgctggccgctgcgggactcggcggcggtgttggcggtggacttggcagcagcaagctgatggtgtcgaacctggactttggcgtgtccgaatcggacatcaacgagcttttcgccgacttcggaccgctgaagagcgcctcggtacactatgaccgatcggggagatcactcggcacagcagatgttgtattcgaacgacgagcggacgccatcaaggctatgaaacagtacaacggcgttcctctggacgggcggcccatgagcatacagctggccacatcggaaattcctgccccacgagcgcctcgcgttctgccacggtctccccgacgacaaggcggcggtggtagcagtggtgcccccagaggtggaaaccaggcccgccgcggaggaggaggtggtggtggtggcccacgccgccagcaacgcgaaaccaaaacagcggaagagctggacgcggaactggacgcttacaccaaggacatgaagtaaaactagatgtcgctaatcagtcagtagtggcggatatcattaaagtatgataggacaggagattgcagtgtgacctcttaagaaaataaaacaaaaaatagtggttactcaattctactataaggacctcaaggtgcgtttcgccaagaaaaaaaaatgacggcaatgtccagctggtagctgcgtgaacggtcagtgtaaataaatcattaaaatgataacagaacgaggagaagtacattaaattaacaagataaattagtatgcagacacgatcatcgttgagcttgcagtcccaggaccggtagactcacgatgatctccatatgtaagcgatgcagttcattggttaatctattgaacgattgcttgatcttaaacaagtagaaaagttcattcttattacaacatactttgtaatttgaacaattagtaaagtgtgttctcaatgctgagaactaacggaaatgcaatgttccaaaaagtgagtaacggtgttacttgtcaaaacactattagtaatctaatttattattatttctcatgtaactctgtgacaaactcaactgattccaattacagacggaatcagtatcactaacagcaggtaatcaccgattgcaaaaaaaaaatcgaaaccgtaagatcacaccattagattcaggaaaattttactacatgaactatcatttcataacttttgtgcagatatagcagtacacattcgataaaatcactgaaaattttgaaacgtggaatacatattcaatctgtgaagctagcagaatgttttagtttgtagttgttaatttaaggaactcacaaagatggaaactcaacaaaaaaataaaaaataaaacaaatttcatcttatatgctgggc

SEQ ID NO: 536 - DNA, 1841 bp, Aedes aegypti
atggtggacaaaatcgaaatgagcctggatgatatcatcaagtcgcaaaaatctcaacgcggcggaggtcgaggtggcctgaataaatccggtggacctccccgcggaaatgtaaaccgtagccgaaatggtggcggaggaggattccgacagaaccgcggtggcccaatgggaggtggcgttcttaaaggccggaaccggggcggaattcagcgaacgacgaaattctcacggggtgacgtaaacagcgcttggaagcatgacatgtacgagggagcccgtaaaaaccggctgctggccgctgcgggactcggcggcggtgttggcggtggacttggcagcagcaagctgatggtgtcgaacctggactttggcgtgtccgaatcggacatcaacgagcttttcgccgacttcggaccgctgaagagcgcctcggtacactatgaccgatcggggagatcactcggcacagcagatgttgtattcgaacgacgagcggacgccatcaaggctatgaaacagtacaacggcgttcctctggacgggcggcccatgagcatacagctggccacatcggaaattcctgccccacgagcgcctcgcgttctgccacggtctcccagacgacaaggcggcggtggtagcagtggagcccccagaggtggaaaccaggcccgccgcggaggaggaggtggtggtggtggcccacgccgccagcaacgcgaaaccaaaacagcggaagagctggacgcagaattggacgcttacactaaggacatgaagtaaaactagatgtcgctaatcagtcagtagtggcggatatcattaaagtatgataggacaggagattgcagtgtgacctcttaagaaaataaaacaaaaaaatagtggttactcaattctactataaggacctcaaggtgcgtttcgccaagtaaaaaaatgacggcattgtccagctggcagctgcgtgaacggtcagtgtaaataaatcattaaaatgataacagaacgagaagaagtacattaaattaacaagataaattagtatgcagacacgatcatcgttgagcttgcagtcccaggaccggtggtagactcacgatgatctccatatgtaagcgatgcagttcattggttaatctattgaacgattgtttgatcttaaacaagtagaaaagttcattcttattacaacatactttgtaatttgaacaattagtaaagtgtgttctcaatgctgagaactaacggaaatgcaatgttccaaaaagtgagtaacggtggtacttgtcaaaacactattagtaatctaatttattattatttctcatgtaactctgtgacaaactcaactgattccaattacagacggaatcagtatcactaacagcaggtactcaccgattgcataaaaatcgaaatcgtaagatcacaccattagattcaggaaaattttactacatgaactatcatttcataacttttgtgcagatatagcagtacacattcgataaaatcactgaaaattttgaaacgatgaaacgtggaatacatattcaatctgtgaagctagcagaatgttttagtttgtagttgttaatttaaggaactcacaaagatggaaactcaacaaaaaactaaaacaaatttcatctcatatgctgggcagttgccgtgtattttcatattgagaaagatcacccatgtttacccctgtcccctgtctacaatattgtatgtggttccttgtgtgcaatagtttggtcaaattttctattgagaagatgaagttgtattgctcgtcttcgcttcagattcgaaagtaccttttgtatgaa

SEQ ID NO: 537 - DNA, 1357 bp, Aedes aegypti
cgtctcgcttgctaaacgagcaagttcgcatcacttttttcgcgtctctcgccatcttggtcgcgtagcgtagtacttttccttttggaaaccgctctgttaaaatcatgtctcacggtcgcaacgagtgccgaatctacgtcggaaatctccccccggatatacgcaccaaggacatccaggatctgttccacaaattcggcaaagtaacgtttgttgacttgaaaaaccgccgcgggccgccatttgcttttgtggaatttgaggatgctcgtgatgctgacgatgccgtaaaggctcgcgatggctacgattacgacggataccggctgcgagtggaattcccccgcggaggaggtcccggaagatacagcagcagcagtagaggcggcaatagtgaccgtgggggtggcgctcgggatcgaggaaatcgcggtcctcccgcccggcgctcccagtttcgggtcatggttaccgggttgcctgcttccggttcgtggcaggacttgaaggatcacatgcgagaggcaggtgatgtctgttttgccgatgtatacaaagatggaaccggtgtcgtggagttcctgcgccatgaagatatgaaatatgccatcaaaaagctggacgattcgcggttccggtcacatgagggagaggtggcctacatcagagtgcgcgaagattctaccaataatgacgatagaaggggaggagaatatcgcgaccgatcgtattcaccgcgcagacgtcgtggaacacccacctactcaccggtacagcgcagcttttcgcgatcgcgttcccgctctttcaactactaggaatctgttatgccgaaacagaacctggacggatccttacctgtggattccaagtaatttcattgacctttaccttttgttttcaaaactcttgcgcatcattgcgctttctttcaaacttttttccgcaagatcctacagacgtaatctaccagagctgttgtgtttgcacaaatgcaaacgcagtaatcatattgtaaatgtaggagtattttaatcattttaagtacattccttgagaaggtaaaccttttcgtgacagggaaaataattgacaaaagatcaatcattttagtcgtaaaatttacaaaaatactgtatgaaaaccagcatatgtaaatgaaaaacaagtgcttgaacaatctttaacggaatgttaattgaaccatataagctttattttcatcaatcagacaaagagtatatttcaacaaatcaagaaaatgtcaaatgaatattagtttgaaaggtataaataatttctaagttctcgtctcttcttctagcctgtgaaatgcgacatgaagatctctatc

SEQ ID NO: 538 - DNA, 3070 bp, Aedes aegypti
atgtacgcacagctgtgcaaacgcatcgagaaagaactagagatcgacattgacaacaccaaatcgaacaccttcctgcaaattctgctgaacgtttgccgcgacaagtttgagaaccgggtgcagtatagtgagaagatcatcaattcggaactcgccctcacagatgatctggaggaaaagaaaaatgtggccaaacagaagatattgggcaatgttaagttcatcggcgagctgtataagctcgacatgctcggcgagccacatctgcacaagatgttgcgctcgctcattaccagcaagtccagcgcgtcgacggagaaaaactgcgaggacatggaatgcttggcacaactcatcaagacctgcggaaagaatctggatacagagctgggaaaacagctgatggatcagtactttgaccggatggaacagtactccctgtcgagcaaatatccgcctcgtatccggtttctgttgcgcgatctgatcgaactgcgcaataacaactggacaccacggaaggtggcccgcgttgaaggaccggctccaatccaggagctcaccaacgaggacgacctggtgctgcggccgtcgtttggcatgcggggccgcgactatcgcaaccagggcgaccggggcaacgaacgggactggatcaccaagctgacgctgaacccgttgaacttcaacgacagcttcaacctgctgagcgtgtcgagcccgacgcccctgataccaccaacgtattcaccgtcgtcgaatggctacggcaaccgtgaccaccgcgataatggtggcagtggaggtagcggcggcggtggtggcaactatcgcatgcacaacaaccgcaacggtggtggaccgaaccaccatcagcataacaactatcacagcaatggcaacggcggaggtggcaacatgcgctacaacaagcacaacaaccaccacggcggcggcggtggcggaggcggtggccgagatggtcagaaccatcaccaccagaaccgggatggaccgaatgctcacaattcgtcctactcgaaccgaggcgacggtatgatgaatagcaaggacctggcgccccgcttcaagcgcaatctgatgacaccgcagaacccggttgaggatctgcagatgcgcccgacgccgaacagtctgctgttcaagacccagaacatgaacatgaagacgcaactgccaatttcccaggcaccgtcgtcgcaatccggcaagggaagtggctacagtgcaccacttggcgatttcccatcgcctctgaccactcgcacgctgctcagtgaacaacgagcagctgccaccgctggcaatagtgcctttggggcaaacgccaccggtaacggctccggtcttggctcaacgggaccagctggtcagcagaacgcttccaacaactccagtcccagccaacagaatcccttggctcggaacaaccaacagaacctgttgaatggaaaatctcaatcgaatcaacctgctgcttcggctcccatcacgcccatcaacaacatcctgcagaaggatcagaacaagaaggacaaaggccccaacaaggaggaattcatgaagaaggtctccgcattcgcttccgacgttttggtggacaacctccagaaacaaatcgacgaggacaaacagaagaagtcccaggacaaggcagtcgtagagaacggtgccgtcaaggaagtagtcgtcgaagttgtcgatcagaccaccccagtcaacccggacaccgtcaacgaagcggatctcagcgaagaaaagtccgaagacagtgacaaatcgtcctcggagaaggcggatgtcggatcggaaaccgaaaagcccgaagaaccagaacaacccaaacaggacgaacgctcgccgatggacgaactggtgcacgagttcgccgagcttaagatcccggaaaagttcatgcgcgactcgatcggtaagatcgtcagcgaaatcctggacaagtcggatgcattccacgagaagatgattgcgttcctgcagcgattgcgcaaggagaacaagctgtcgaacggagcgatgctggaatccttcaaggcgctggtcaactcgatgaacgaaaaggagaagaccatccccaagatcaccaccatcgtggcgtcgctgctatcgcgggcagtgtccgtgcggctctgcaaactgtccgacatttccaactacaccgacaacggccagcactatccgctgttcctgctggtgctgcagcagctgcacaaacagctcggcaagcagcccctgcaggaaatgttccaacagagcaaggtgaacctgatgaccagcctgcccgaaagcgaccgcaccaaggaccgcatggcggagatcctggaggatcgcaacctgagcttcctgtatccgctgctgcgagtgcaggccgaactgtggaagcagatccaggccgacgccaacccgcagcagttctacaagtggatcaaggagaacgtggaagccagctgctatacggatccgggattcatcaccgcggtcatgaccgtgctgctgaagtacatcatgcaggaatcgtccaagtgcgcggatgagaagcagtcggtggagaaggagaaggaaatcctgcggaagtactgcccggtgctgaacgcgttcctgaatggcaacaacgatctgcagctggttgcgatctacgccatgcaggtctactggtacagcatcgattttcccaaaggagtcctgttgcgttggttctgcgacttctacgagctgagcgtcatcgaggaggatgccttcctgcgctacaaggaggacgtcaccgacatgtacccgggcaagggtaaggccctgttccaggtcaaccagtggctcacctggctggccgaggccgaggacgaagacgaagaggacgaagagtaagcggggagcgcgagttgttggatgaagcgatatatttttttattgactgtatgtgtagaaaccccttctcagatgttttaacagctaatttttgcgaactgcaacaagatttatttttatacacatataaacaccaaaacgatgtgatcggtaaatcgattggatt

SEQ ID NO: 539 - DNA, 1838 bp, Aedes aegypti
ccgacagacagaccggttcgatgaaaggtcggccattttcaaagtgtgaaaaaactggactggcccagtcaggagaagatcgacacgcacgccgaaagtgttagctgctgcgtttcgtctggcttcagctcggaaaagttactagttattttttttccctgaaatccatcagcggacccaatttgagaagtgaacggtgcgaaacggatctaaaacggcgccaataacagattccagcatgagtagctacgggaggccaccgccacgaatcgacggaatgatttccctcaaggtcgataaccttacttaccgcacgaccccggacgatttgcgacgcgtcttcgaacgctgcggtgaggtgggagacatttacattcctcgtgatcgtcatacgcgcgaaagccgtggctttgcgtttgtcagattctacgacaagcgcgacgctcaggatgctctcgatgccatggacggacgcatgttggacggcagggagttgcgcgttcagatggcccgctatggacggcccacttctcctcagcgcggtggaggtggaggcggtggcagacgatatggcggaggtcgcgaacgtggccgttcccgtgatcgccatcgtcgccgttcccgctcgctagatcgtccccgtggcggagttcgtcgatcctactctcggtcgcgatcccgctcccgggaccgttcccgttcgggaagcaaatcgtcccgcggtaaggagtccagatcccgcagcccactggatcggggaacgcactattagattgtagaatctatcgcacaggccaatccagatgttgtggccggtgtttcccctcatttcaaacataatggaccagaaaatgatccagccaaaaaaacgcagcgaaaacaacattagatgatgaccccatttagagtgaccgtgtgcgtttgtttaacgtaaaataactactctcagcaactacaaaacaagcatataaatttatttaaaacaaaataataaatggaagacggacaaacagtaaacaaatggtgtgtggaataacttgtaagcaaaagcggatggagaaggaatgagcggggcatccccggagtatgcagcgatgatttgcgtggcgaaaggaaaccgcaaacttttgcagataagccccaatctcccaactattcgttacttcgcactactctgacggaatcacacaatcatcgatggcaaatccaaggaagcccctccctctccaaatgcatcataccgactaacatcaacaacagacggtaagtccgattagattagaactttggagaatgatattttttctcacataatttaatgaacacaaatttaattttacttcaatgaagaacataaattttaagctacaattcatgcgtaatcccaagaaatattctactgtatgaatagatacaaaaaaaacctgcgaaataaattgatgatacaatcctccttacatcgttgtcgcaacgaaaatttgcagaagaattactaggtccgaaatccttgcgcagaacaagttcctaatagttgaagaagtttccgtctccagtttggcgcgagtagcccggattggtcaacggggtgtgcggtccggtgttcatcagcttgaccgtgttgggcgaagctttctcctgtagtcctccgatttgcagcgggtgtttgagggggatgatcttctccggactcagatcccgggtattgcggagccgccgaaaggtagcctgcccgatggtttcctcctgtatgacgacgtcgttcttgcctttgaacagctcatccgagtggttgtactgcgacgctaggttgatgtccaaagagtcgtgcggtatggggc

SEQ ID NO: 540 - DNA, 2666 bp, Aedes aegypti
atggacgaatgttgggacgacgacaattacaatagcgtttgtggtaatggcggtggaggaggaggaggtggtggaattactgctgcacggcacacgagcgtcaaacgcggtggatccggctacgattccggaatgtcgtccggtgcgcgatccgttggcacccgggagcggacttcgtttgaggtatttaccacaaaagttccgatcatcatcgggaagggtggcgtgaccatcaagcggatccgaaccgaatcccgggcgcaggttgagatagatgacaacacacccggtaatggccgctcgacgattcacatcgagggcttcacgcaggacgtgtcccgtgcccgggacgctattttcggtgtaatcaacgataacgcacgtggcggcggcggcggtggaggcagagggggttccggcagatccagcaactccggctggggtggagatggttcgcgtggtggctttggccgggatcgtgatcgagatcatgacagtcgcagtttctacaactccggatccggcggcggtggcggtgggggtcgggatcgcggaagtaacgatttctacaactccgggtccagttacggtggaggaggtggcggtcgggatcaaaaccgcggcggtaacgacttttacaactccggctcaggttttggtggaggtagagggggacggagtgctgccccggtgtccaataacttcggccagcaggaaaatggtcgccccaagagtcctgaactaatcgattgggatgcacttaacaaacagtgcgacgaggccacggctcggcaatgggccaagtgtccaaagctgatcaagaatttctacaacgagctgcccgaagtggccaacatgacgccggaggaagtgagtgagtttagatgcgcaaataacaacatcgtcgtagatcgaaccttcaaagacgcggacaaaccctcagcaccgatcccgaatccagtacaaacgttcgagcaggccttccacgagtacccggagctgctggaggaaatcaaaaagcaaggctttgccaaaccatcgccgattcaggcgcaggcttggccagtgctactcaaaggtgaagatctgatcggaattgcccaaaccggaacgggaaagacccttgccttcctgctgccggcgttcatccacatcgaaggacaaccggtgccccgaggggaagcccgtggggggccaaacgttctggtgatggcgcccacccgagaactggcgttacaaatcgagaaggaggtgttcaagtatcaattccgtgacatcaaagcaatttgcttgtacggaggaggtgatcgacgaacgcagatcaataaggtaaaaggcggtgtggaaatcatcatcgccacgcccggtcggttgaatgatctggtggccgccaacgtcattgatattaccagtattacctatctggtattggacgaggcggaccgtatgctggacatgggtttcgaaccgcaaattcgaaaacttctactggacattcgtcccgaccggcagaccatcatgacgagcgcgacatggccaccgggcgtacgccgtttggcgcagagctacatgagcaatccggtccaggtgtacgtcggaacgctggatctggccgccacgcacaccgtcacccaacagatcgaggtgatcgacgaagaggacaaatacatgcgggtgatgaacttcgtgaccaacatgggacccagcgacaaagtgatcatcttctgcggcaggaaaacgcgagctgacgatctatccagtgagtttgttctgtccggcatcaattgcaccagccttcacggcgatcgagaacaggccgatcgtgagcaggctctggaggacatcaaatcgggcgacgtgcgggtgctcatcgctaccgatgtggcctcccgagggctggacatcgaggacatatcgcacgtcgtgaactacgacttcccccggaacattgaagagtacgtgcatcgagtgggccgtactggtcgtgccggtcgaagtggagtttcgctgagtttcttcacgcgtggcgactgggcggtggcttccgatctgatcaaaattctggaagaggccgatcaggaagtgccggaggagattcgccagatggccgaacgatttacggcgaaaaaagagcgagagggccgggaaaaaagtgcctttggtcggcgtgatggcggaggacgtggaggcggtggaggcggccgtagaggtggtggccgatggtaattgtttctaatccagaaaccagctagattgtcgcgatctgtgacaatatccttgtatatttttcgacgtttgagccgaattatggttagtagctaaagattatttctatcgatcaggatcttgacttaactttaggcgcgcttcttccgttactttaaaatgatcgatcgatcgatcgattgattggactcttctcggaatatttaacgatcataatttcgaatatacataaatacctacgtgtccaattgatatttggagtgcgcgagtcgccacaagactgggacccttgaactgggaaatcatttggttgagccaaacttcgaaatttgtaaacccataaaccgtgaattaactttccgttcaaatattctcgctctgaacttttcataccattaactattgttttataatattacaaatacagatttatataacgt

SEQ ID NO: 541 - DNA, 1528 bp, Aedes aegypti
tccgatctttatcttagagttgtttcgcctctccgtgaataaatattttaagcgtgtagctacccaaaaacagaaccgctaaacgcaccgccgaaccgaaaaaaatgcttccgatctgtcaaattcggaaaacaaacgccgacagtcgaggtggccgccagaagaaaaaaagcgattttcgcacgaaaacttagagtttattttcaacattttcatacaaattctgcccaaacattcagaagaaagatgttttaccacatatctctcgagcacgagattctcctgcacccgcgctattttggcccgcagctgatcgaaacggtgaagcaaaagctgtacaccgaagtggagggaacctgcaccggtaagtacgggttcgtgatagccgtcaccaccattgacgacatcggttccgggttgattctgccaggccagggcttcgtggtctatccggtcaagtacaaagccatcgtgttccggccgttcaagggcgaagtgctggacgcggtggtcacacaggtcaacaaggtgggcatgtttgcccagattgggccactgtcgtgcttcatctcgcaccactcgatcccggccgatatgcagttctgtccgaatgggaatccgccgtgctataaatcgcaggacgaggacgtggtcattgccttggaagacaagatccggctgaagatcgtcggtaccagagtggatgccaccggaatttttgcaatcggaactttgatggacgatttcctgggtctggctggaagctaaaaaaaaatgttctcagatatttataccaagctaagtatatttttattttatcaattatatctaattaagaattaacaaaaagaggatagttctagaaatgatcaataataactctttatgataaacgacactagatttatttggaaagaaaactttgggcaaaatggcaatttacttatttattttatttattttgaatctatcttctgacttattgtaaaagtgtaatgtacagaaaaatcatttttaattaaaggtaagtatcctttaaagcaaaatgttctctaaaaagccattatttccttccttgaccttgtaaaaagtttaaaactaataggttatcgtcacaaataaataaacatacatacattatttccttcttctccttgtagtcctccgggtgtaaattcctgaggctttcgcgattaatccgcaggctttcttaaaagattcgttcagagatcctaaaactcctctcaagaaataaaacttcctccagtcctctcaagaaaggtctgaaagaacccatggtgtaatttcctaaggaatcattctgaaaattttcccggaatttctttcagaggttcttccagtaattcttttaccattttctcttgcttcgtatcctaacgtttcaaagattcctaccggagttcttccaggcaaatccagaaaattaaattataggtttgacagggctgttagtctctttttaaatactttttctctatgcaagtctctaaaaagtgtctatttttaa

SEQ ID NO: 542 - DNA, 1027 bp, Aedes aegypti
caaaaaagtcattcaccgaaagcgtacgacgaagatataaacaaaattctgtccgtaaaataattagattttttcattgaaaaacggacatttttctagagaaattagttgcaaaggttgaccaacgatgacctccgttcatacaccatcagttgcccttagcaaatatcgagaccagcattttaagggatctcgccacgaacaggaacggctgctacggctcacatctaccttatacattggcaatctaagtttctacaccacggaggaacagatacacgagctgttttcgcgatgtggcgacatccggcgcatagtgatgggattggacaagttcaagaagacgccgtgcggtttctgcttcgtggagtattacgcccgggacgatgcggaaagcgctatgcggtacatcaacggaacgcgactagatgaccggattgtgcgtgtggattgggatgccggtttcgtcgagggacgacaatacggtcgcggaaagagcggcggacaggtgcgagacgagtaccgacaggatcacgatctcggccgcggcggatatggcaaaatggtccagatgggacagctgggggcgaacatgagagacagctaggcgtgagaccccgaaggagtttcggatcgtgggcgaagttattttaagattatgattatacataggacgcgtaaattaaacattgaaagaatgaatttcgtcacttacttgacatcatagttcagtctttggtccgccggagagttggggccctttcttcagattgggcttctttttcttagtgggtttggtttgagaactgctggatctttctgctttctcccgatatgggttgacgtaggtgtcggaccgtttgctttcgtcaatttcctgctcgagcagtcccagaagctcgagtgatttctgatccagaatgctgacaaagcttcgagtgtagattagggattcgatgacgagcttcttccagtcgtcgagggttttcagaatgcggtacgatatgtccgggaggtggagaatgag

SEQ ID NO: 543 - DNA, 2454 bp, Aedes aegypti
agtaacagcaatatcatcagtgttgtcgtttcgtaaaatgggctaaatcaatgacgctttgtcaagaaaaaaattgttgtgcaaattttgatcgatcaaactcattgggacctgttgaaagtgtactcgagcctctgaccgtttttggcagacgacacgacaaaactgcacgacagcgcagtgaaagacaaaaagcgttcgccaaggctgccgttccggattaagtaccgcgttgagtataccataataaaaagtaggatctttttcggaaagaaaagatttgcagtgacccgcttttttttaccggaaacgtcactaggttttgctcccggattgttcctaaaggatggcggacacaactgcgtcgagtacgacgggggctgctgctctcggatcggactggatcaaaaaagctgaggatcaggaaatttccaccctggtgaacgaactgagcattgacaaagaaaagaaggaagcggaaagtccgactaagaaggaggaatcgcccgaagagggaaaggtatcgaattctagtacggctgaaccagccacggcagcaccttcggaaccggcagctaaagaggaaggagctaacagcgaaaacggagagaccgttagttccgcagaagacgcggaagcgttcaaccctgcagatgccagtttactgatgaaaatcatccgcaaggggttggtggagtccaaactcgatctggaagtgcagcggaaggatccttcgtctcctttatattcggttaaaacattcgaagctctgcacctgaagccggaattgttacagggagtgtacgccatgggtttcaatgcaccgtcaaagatccaggaaacggcgttgccaacgttgttggccgatcccccccaaaacatgatagctcagagtcaatcgggaacgggtaaaacggctgccttcgtcttggccatgctgagtcgcgtcgatcctaggaaaaactatccacaggtaatatgtctgtcaccaacctacgaattagctatccagaccggtgaagtagccgccaaaatggccaagttctgtccggagattaagctgcggtacgccgttcggggagaagaaatagccaagggtgccaagctgaccgatcacatcataatcggcacgcccggcaaactgatggactggggcatcaagtttcgggcgttcgatttgaaaaagattaccgtgtttgtgctggacgaggcggacgtgatgattgccacccaaggccaccaggaccagtgcatccggatacacaagcagctgtcgtcgcggtgtcagatgatgttcttctcggccacgtacgagcgggaggttatggaatttgccgaatatatcgttccgaatccgatcgtgatccggttagcccgagagcaggaatccctggacaacattaagcaatactatgtcaagtgccggaaccaggacgataagtatcaggccatttcgaacatctacggcgttatcacagttgggcaggcgatcattttctgtcatactcgaaaaacagccagttggctgtccggtaaaatgtcccaggatggccattcggtggcagtcttgtccggtgagctgaccgtcgagcagcggttagcagtgctggatcgtttccgtgccggactggaaaaggtcctcatcacaacgaatgtgctctcgagaggtatcgacgtcgagcaggtcaccatcgtggtcaatttcgatctgccgatggatcaacacggtcgtgccgattgtgaaacgtatctgcatcggatcgggcgcaccggtcgcttcggtaagaacggaatcgccatcaacctggtggatagcgaccgaagcatggcgatctgccgatctattgaggcacactttcagaaaaagattcatctgctggacgctgagaattcggacgaaatcgaaaaaattggctcctagtcgttttaactgttcattctcacatagctggacccgatattgcttcgatgcgcctacgaatttgattcaacaccttttttgattacacgacgaaagagagcgagcgaagcttattaagtttattatttctacgttaaattgctgactatcaggccagaacgattggagttgtagttgcatttagtttctctctgaattcaagtgcacaaaccttccaatcgatgatacccagtggaacacttgcgatgaaggaatggtttaaaactatttcttacgttagattacaaatatttgtgctgattgaaagagaggatgagtttcgcgaaacggctgcaaacacacactggaggaaaagagcggaacaagagaatgtaaagtttaaaagcaaaaatattataatataaaagtataatacaaacggcttgtgaaagcaaaacatgacgcgtcaaatgtatttgtatgtattcatccgaacgacgaagcaacacaatgtcttttttaacgtattcaaaccttctgagcagaacagaaac

SEQ ID NO: 544 - DNA, 3953 bp, Aedes aegypti
atgtcccggtatatgcaacgtccggaaaatgccctaaaacgggccaatgaattcatcgaagtgggaaagccggcccgtgccctggacaccctccaggaggtgttccgcatcaagaaatggacctacacctggtcggaatcggtgattgagccgattatgttcaagtatctggacctctgcgtggagctgaagaagtcccacattgccaaggagggtctgttccagtatcggaacatgttccagctggtgaatgtgggttcgctggagaacgtcatccgaggctatctgaagatggccgaggaacgcacggaagccgcccagcagcaatcgtcccaggccatacttgacattgacgatctggataatttggccacgccggaatcgattctgatgagcgcggtttgcggcgaggatgcccaggaccggtcggatcgaacgattctgctgccgtgggtcaagttcctgtgggaaagctactgtcagtgtttggaactgctgaaggtgaactcccattgcgagaatctgtaccacgacattgccaagatggctttcggattctgtttgaagtacaaccggaagatggagttccggaagctatgcgagaagttaaggaagcatctggaagacattagcaaggtgagctcgcagacggccaatgtgagcatctcgaagccggagacccagcagctgaacttggacacccgtctaaaccagctggactgcgccatccagatggaattgtggctagaagcgtataaggccatcgaggacatccacgggctgatgacactgtctaagaagactcccatgccgaagacaatggccctttactatcaaaaattggccatggtgttctggaaggccggcaatcaactgttccacgctgctgctctattgaagttgttccagctgtcccgtgacatgaagaagaatgtcactcaagaggagatccagcgaatgacttcccacgttctgattgccaccttggccattccacttccgtcggctcatccggagtttgatcggttcatcgaaaccgacaagagccccctggagaaggcccagaagcttgcggttctgcttggactgcaacagccaccaacccgtgcttcgttgctgaaggatgtgctccgcttgaatgtcctccaactggccgctccccagttccagaacttgtacaagtggctcgaggtggaattcgatccgttgaatctctgcgaacgtgtccaaaacatcatccaggaaatcaccgtcgatgagaataatccctacgctcagtacactcaggccctgcaggatgtcaccctggtgcgtttggtccgtcaggtttcccaagtctaccagtcgatcgaattctctcgtttcttggcactggccaagttctccaccagcttctacctggagcgtattctggtggactgtgtgcgtcacaacgacatgcaaatcacgatcgatcaccgcaaccattgcgtccatttcggaacggatctgagcgagagccaacgggaggatcatcccgatggtcccacgcttcaatcgatgccctcggaacaggtccgctcccaactggtcaacatgtccgttgtccttcatcgtgccattgccacgatcaaccccaaccggaacaaggccgaacgcgatcgtctccgggctcagatggtcaaaagctacgaagaaaacatggtcaaggaacatcagcgcattctccaacgtcagaagaagatcgaagatcgcaaggaatacatcgagcgggtgaatctcgagcgtgaagagaaggaactccgcgaactagaggaagtcgctcgccagcataaactcgccgaacagcgtcgtctggagcaggaaaatgaggaacgcgaacgcaaacgttacgagaacgaagtccagatgatcaaggagcgcaacatgaaggaaaagatcgatcaaatcaagcagacggccgccggtcaaaagatcctcaagaagttcgacgaggaagacatcaagaagatgaacgccgaagagatcgccgccaaggaggcggaagaacgccaaaaggaacgcaaggcccacgacaacaatctcaaatcgcaggagaagaagatcgattacttcgagcgggccaaacgcctggaggaaatccccctcatcgagaagtacctcgaggacaaactggtccaggataagcagttctgggagaaacaggaagcctctcgcatcgaagcggccatcgccgaacgcaagaacgccgaagctgtccaggagcgcttgaagcgcatgcaaccggaccgggaaatcttctggcagaagctgaagggcgagcgcagcaaccagtttgccgagaaacttaaggccttcaatgtcgccctggaggaagagcgcaaacggcgtctgaccgaacgggtttatgagcgacgcgaggaacgccgccagaaatggctccgcgaaaaggaggaagaacgtcgccgggccgaggaggaaatccgcaagcaaaggcaggaagaggaacgcatcgagcgtgaaagacgtgccgaggaacggcgcatcgaggacgagaaggctcggttgctcgaagagaagagacgcgcccgcgaggaagaggctacgaagaaggcggaggaaaatcgccaaatgcaggctaaagctcgcgaacgtgaacgtgagcgtgaggcagattcctggagagatcgtcgtggaggtgacgctccagctgcggcagctcaaccaaatccggcagcgcaagaagccaccaagccagaatccggatggagaacagccggagcacgggaaccgaggggagaggatgcacccaagaaggacggcgtctaccaaccgcgcttccgtgatgtacgtggcggtggtgctggcggagccggaggtgttgaacgacgtgctgatgatcaggagtcgaacaagtggcgtcacggaggagacgacggaggcaaggatgatcgcgatggacctcgccggatgggtggtgataggccgccaatgcgccgcggaggagacgaccgcgatgaccgtggaccgattcgtcgtggcggagacgatcgtgatgatcgtggcccaatccgccgtggagatcggcctccgatgcgcgatggtgaacgaggtgtcggcatgcgtcgagagggaggcgatcgcgaacgtcgtgacggcggagatcgtcgggactttggcggcaaccgtgaccgtcgtgacgaccgcggaggaccacgtcgtgacgatcggggagaccgcggtggcgatcgtgacagcgcatggcgccggccagcaccccgcggaggcgacgacggtggcaattggagaacccgacaggatcaggccaaaccgaaggacgatcgtcgcgaggagcgaccgaaggaggcccgcaacaccggcccggatgaggacggctggactgatgtgaagcatcaccgttaagcacacaactctttcggcgttggaaacatttatccagaatatatgcaacttttttcaaaaatctttagctgtaccttatatttgttttagacagttcattttaagacatttttgctattattataggctgcattaaaataaggcgaaatggttcccagttccccaacgattaacaaacaacctggttttgatctactttttttcgatccattgatccataccaaaaaagggtggacagtataacaactaacggaaccatttccggcaaaaactgcaaacgctaaactggagggtctgagatgggggcaaatttataaatattactcatattacacacaactattacacagacatacgttaacaaatgaaactaggatcctagaaacattcggtagtttgattgattgataaactttatggggcatgaatggtaaaacttgggacgagatggagttgccttgcgagagaagtgtaccccaatgtattgagagctctgaattctgtctgaaccagttctattaaatcgtatattatattcctatgtaaccatg

SEQ ID NO: 545 - DNA, 3142 bp, Aedes aegypti
atgagacactacggacagatacattcgtattcaccgtcgtcgaatggctacggcaaccgtgaccaccgcgataatggtggcagtggaggtagcggcggcggtggtggcaactatcgcatgcacagcaaccgcaacggtggtggaccgaaccaccatcagcataacaactatcacagcaatggcaacggcggaggtggcaacatgcgctacaacaagcacaacaaccaccacggcggcggcggtggcggaggcggtggccgagatggtcagaaccatcaccaccagaaccgggatggaccgaatgctcacaattcgtcctactcgaaccgaggcgacggtatgatgaacagcaaggacctggcgccccgcttcaagcgcaatctgatgacaccgcagaacccggttgaggatctgcagatgcgcccgacgccgaacagtctgctgttcaagacccagaacatgaacatgaagacgcaactgccaatttcccaggcaccgtcgtcgcaatccggcaagggaagtggctacagtgcaccacttggcgatttcccatcgcctctgaccactcgcacgctgctcagtgaacaacgagcagctgccaccgctggcaatagtgcctttggggcaaacgccaccggtaacggctcgttcgcgacatctgccagctttggacctggactaggaagcagctcatctgcaggaggacccaacggaagcggtcttggctcaacgggaccagctggtcagcagaacgcttccaacaactccagtcccagccaacagaatcccttggctcggaacaaccaacagaacctgttgaatggaaaatctcaatcgaatcaacctgctgcttcggctcccatcacgcccatcaacaacatcctgcagaaggatcaggtgatcatcaagcaggctgccgtcgagaaggccgaaaagaagaacaagaaggacaaaggccccaacaaggaggaattcatgaagaaggtctccgcattcgcttccgacgtgttggtagacaacctccaaaaacaaatcgacgaggacaagcagaagaagtcccaggacaaggcaatcgtagagaacggtgccgtcaaggaagtagtcgtcgaagttgtcgatcagaccaccccagtcaacccggacaccgtcaacgaagcggatctcagcgaagaaaagtccgaagacagtgacaaatcgtcctcggaaaaggcggatgtcggatcggaaaccgaaaagcccgaagaaccagaacaacccaaacaggacgaacgctcgctgatggatgaactggtgcacgagttcgccgagcttaagatcccggaaaagttcatgcgcgactcgatcggtaagatcgtcagcgaaatcctggacaagtcggatgcattccacgagaagatgattgcgttcctgcaacgattgcgcaaggagaacaagctgtcgaacggagcgatgctggaatcgttcaaggcgctggtcaactcgatgaacgaaaaggagaagaccatccccaagatcaccaccatcgtggcgtcgctgctatcgcgggcagtgtccgtgcgtctctgcaagctgtccgacatttccaactacaccgacaacggccagcactatccgctgttcctgctggtgctgcagcagctgcacaaacagctcggcaagcagcccctgcaggaaatgttccaacagagcaaggtgaacctgatgaccagcctgcccgaaagcgaccgcaccaaggaccgcatggcggagatcctggaggatcgcaacctgagcttcctgtatccgctgctgcgagtgcaggccgaactgtggaagcagatccaggccgatgccaacccgcagcagttctacaagtggatcaaggagaacgtggaagccagctgctatacggatccgggattcatcaccgcggtcatgaccgtgctgctgaagtacatcatgcaggaatcgtccaagtgcgcggatgagaagcagtcggtggagaaggagaaggaaatcctgcggaagtactgcccggtgctgaacgcgttcctgaatggcaacaacgatctgcagctggttgcgatctacgccatgcaggtctactggtacagcatcgattttcccaaaggagtcctgctgcgttggttctgcgacttctacgagctgagcgtcatcgaggaggatgccttcctgcgctacaaggaggacgtcaccgacatgtacccgggcaagggtaaggccctgttccaggtcaaccagtggctcacctggctggccgaggccgaggacgaagacgaagaggacgaagagtaagcgtgatggagcgcgagttgttggatgaagcgatatatttttttattgactgtatgtgtaaaaaccccttctcagatgttttaacagctaatttttgcgaactgcaacaagatttatttttatacacatataaacaccaaaacgatgtgatcggtaaatcgattggattcgtggtagacattttgtttcgtttctgttcttccgatgatcaaactattattgtgaaaatttaattgtgatccttagttagagcttggttcgtgttcgagagagattgtgttgatttgttcggtgtgtggatgggttcaaaatgtgggatatcttaaatcagtaatcacagatggtgttcttgtccgaaaaggacggacttttaattgatagttcaatttatgcagcagcagtaactcagtaaaaggataatagcggaatcactataatttccactctgagcattagaaggagagattctgcaaactatgtagtcttgcgatgatatcaaccttattcctagaatgaaagtgcaattggtgacgatatgtgtccgaaatagattattcaccccctaactccccagaaagtacgagtgtttgtgactgttacagtagcgtttagtttctttccgtaggcattaaccacgcgtattacaataaattatattgtgacagtagtacagtgtaattagtcatttgatttttgtctgcaccattgaagattaaccgttcgctctagagaagcattcactctttcaccgcataatgtatcataaatagaaaaaaggacaatttacaatcgccccttcccactaaaatatacggccgcctaatttttccaaaagggctttaggcct

SEQ ID NO: 546 - DNA, 2096 bp, Aedes aegypti
aacaaagcgatagccatggacgtcgcaaggcaactgctggacgagctgatgggccggaatcggaatttggatccttccgtcaaaaccaaagaactcaactgggaagatgaagagttctgcacatacttcatggtcaaattttgtccgcacgatttattcgtcaatacgcgagcagatctgggacagtgcggcaagctgcacgacgaagaggcgaagaagttgttcgacgcggccaaaccgtgccgcaagaagatccagtacgaggaggatttcctgcgcttctgcaccaacatgatcaacgaggtcgaccggaagattgtgaaaggtaagcaaagactacttttgatgaacagcaaactggagggccgtccggtttccaagcagcaggagcagatcaacaccatgaacgagaaaattgagaagctgctgcgggaggccgaggaagcggggatccgaggtgatgtggatcaggcacagagcttgatgcaaatgagcgaccagctcaaggaggaaaaggatgaactgatcaaacagcatgagtctaacggatggtcggtcactgcggaatacgcagcggcacaggagaagcaaatggaagtgtgtcaggtttgcggtgcttttctcatagtgggcgatgcccagcagcgtatcgacgatcatcttacgggaaagcaacatttaggttattcaaaattgaggacagctgttgaggagatgatggaagctagaaagaagccggctccacgagttgaagagcgtcgacgagacggcgatgatcgcagacgcgatcgccgtcgggatgatcgtagatcgagagatcgcgacgatcgcttcaagcgggacgacaggcgccgagatcgacgggattatagagaacgagactacgagcgtcacgagagacgtgatcgtgatcgcgactatgaacgacagtataagagaactgatcgtcaccgcagccggagtcgcagccactaaatcagctgaccgcataacaatccttgtgtcgtaacgatggtgtttatgtttactagaagtacttttaacagttctgcgttcaacccgacatacaatcggattaagaggtatcccaagctacagaaataaaattataggcaattaataatctatcagctttccaccaggaacgtcccagtttcatccattgtggtcccaacaaaaccgtttacttaatcacgtagagttgagcaatatcattagtttagttgtattcaaaaaaacattataatcaacagtaactacgtatcgtatgcttacgtagtcaatttgaatgaaaaaatatatcataattgtgacaatagtgcaaactcagacgacacgccatcaagtatcaacgaatttcaacgccgcagctgctgcaacctgttcccaaggacatagctctgacatcaactatgaacagaaccgcaggtatcgtgcgtttttatcatcctccttattttaatttaagattatcgcaaaaaaaaaagtaaaccagaagagaataacattttaagatcgtgtatggaaatgtgaggctctattggtatccaataagcacaatactgctgtctgtaaaaaaaaaatgcaatcgtagtttttaatgttaagatcactcctaatctctatcgcaactaagctgaaacagcccaacttttctttccggtgttcttttaaacgattttctcactcataagtgtatgtgtaaatttccctaattcagtcgacgcgcccttttcaattgttgtctgtttcaatcttaaactcccctacgatatgcttaactttgcagcagtgtgtagcacgtttagttttaggtttcaccatgttggatttgataggaatcaattataaaatcacaaatataaaatggttaactgcagctacgaaacatacgaaacgagtgcaaaccttcttgagagatcagaattctacaaaatacatgcctatatagacacaatctcactaacaatttatcaaacaccacagcacgtgaactgcaatacttcttgggctgctactcgaatatgttgcgcagtgcatatggacataagttcttctgtttcaataaagtacaatttgcgattggaattaaaagt

SEQ ID NO: 547 - DNA, 2504 bp, Aedes aegypti
gtcttcacgagtctcgtttcaggttccgcccatttgaaaaaagtactcagaaatatctactgtggtattgaaatttgccagtctttccagcacaatcgtctctacaatccgcaaatgacagttctgaaaacgaaaaaaaagcaagaaaaattttcatcgcgttgttgcacgggggtttcgtgccattgtaaatttcaatttttcgtaagaaatcctgcctaatcttgctttaatatactgttagtttgtgctttgtgcggccaatcgcattttgtgcatattttcgttcggaaattggctaaaaacagtgcataaagttcgatttcatttggtactatcgggggcggagaaagaagaagaaaaattagataaatctataaacaaagcgatcgccatggacgtcgcaaggcaactgctggacgagctgatgggccggaatcggaatttggatccttccgtcaaaaccaaagaactcaactgggaagatgaagagttctgcacatacttcatggtcaaattttgtccgcacgatttattcgtcaatacgcgagcagatctgggacagtgcggcaagctgcacgacgaagaggccaagaagttgttcgacgcggccaaaccgtgccgcaagaagatccagtacgaggaggatttcctgcgcttctgcaccaacatgatcaacgaggtcgaccggaagattgtgaaaggtaagcaaagactacttttgatgaacagcaaactggagggccgtccggtttccaagcagcaggagcagatcaacaccatgaacgagaagattgagaagctgctgcgggaggccgaggaagcggggatccgaggtgatgtggatcaggcacagagcttgatgcaaatgagcgaccagctcaaggaggaaaaagatgagctgatcaaacagcatgagtcgaacggatgggcggtcactgcggaatacgcagcggcacaggagaagcaaatggaagtttgtcaggtttgcggtgcttttctcatagtgggcgatgcccagcagcgtatcgacgatcatcttacgggaaagcaacatttaggttattcaaaattgaggacagctgttgaggagatgatggaagctagaaagaagccggctccgcgagttgaagagcgtcgacgagacggcgatgatcgcagacgcgatcgccgtcgggatgatcgccgatcaagagatcgcgatgatcgcttcaagcgggacgacaggcgccgagatcgacgggattatagagaacgggactacgagcgtcacgagagacgtgatcgtgatcgcgattacgaacgacagtataagagaactgatcgtcaccgcagccggagtcgcagccactaaatcagctgaccgcataacaatccttgtgtcgtaacgatggtgtttatgtttactagaagtacttttaacagttctgcgttcaacccgacatacaatcggattaagaggtatcccaagctacagaaataaaattataggcaattaataatctatcagctttccaccaggtaagtcggtttgtacaatatcaaaactctaatcgatcttttttgcgtttctttcatcgtcgattgtgtactttctatgtcatatttttcctaaagagtaagatatcagacgaagcaaaaagaaaatgttataacagttacactcggttcgacggcatgtttaacgtgctaaggtgtgtcttgttgagggtcgttacatttctctgaacaggttagtgttgtcagatagagaaaaaaaaaatgaaaatcccttgcaggtgaatcgtgttggcgaacttgtggaaattttaatcgcgaaacaggtatacaatcacgatcagcaaaacaccctatcttcgattccattatccttccagttatgtttccttcggggttacagtcctccgtaaagagcgaagaagtcgcgaaaaggtatcttcctaattcacagcatgtttcacagtaaacattttccactgaacttatagcttttacctagaacgttcgggtccgcttaaaattttctcttggttccggatgatcagggatcccgtgcacgcgaataacgaggattgagaggtacattaagttaaaacaaaatgatttttctctaaaataatgcccaggatggcctgtggagaattttttcggtaccgtaggcgtgaagcagaaccgtttcctactgtcgtcatcgaatgtatcaatcatttgatggtaatagcagcaccaatccatgatatcaggtatttgctattatttttgtgatatgtctaaatcttgctggtgttttagatgctaccaatagaatggtttcaggtcaaatggatatgcgttcacactatatgttgctgtgtacttcatagttttatttgttcaacgaagagttattattagccgtcagcaagggtccaaactataactataacaaacacgtattcccgttcatcgtaacattgcttcctagcatgtaccaactttgcctttgacgcattcaccaccagttc

SEQ ID NO: 548 - DNA, 3732 bp, Aedes aegypti
atgaatcgtgcccggcgcagcacagccgtttacaacaaaaagtccaccaaaaagcagcaggttagtgacgatgatttcgagagtgaggggttttcggaccaaccgacggaagatgatggtgacttctcggccagcgaggaagagtggctcccgggaggggataaagatgccaagagcgacgacgccgaagcccagggaacagtgtcagacgaagatgagtatgacgaaggatcagaggacggttccgaggatgcggatgaccttgaaggagattccggaagcgaagggagtgttgtggccgcagggaagagtggaactaagaaaaggacatcgaaatcgtcgaacaatccttggccaaagaagaaacggctttctccaacgacacgagacgaattatacaagcgtaccaagaagaacctgctcaaggaagtggcgacagagttaccgtccctgaactccagtttgtccgacattctgaagcaatgtcagtttcagaagaagagggatctatcccacagttcgaaacaagcaccagaaagagtgaaacaaagcacggtcaagaaagtgaagggcggtgacgagtctgatagcagcggagacgatcacttgatgaaaccggaggagttggatttacgttccaattttttcgataagattgaatcgacgaagcggcaatcaggagaacctgctcctcaattcgattgcaatgcgggtatgcgtttgtcggacagctcggacgatgatgaccaagcagaggaaccaataccgtcttccattcagaaagtagccgcacagaagctgatcaataagatcaatgaatcttccagcgaatttctgaactttaacaacctgggagagtttaacaaaaagatcgaggaagcgaagagaatgctgaaggactatcaggcgaaggagagtcaggaaagcactcagaagacgaacggagaagatgtttcaaatttattggctctgggtgagatggaggctggcacctcacctgggaaacaaaacgatgctggccaacacaacgaggaagaagaagcgagtgaagaatcggactgggaagaagtggaagatgccgcccgaagtcaaagtcaaacgaccggaaaacttccagacgactatcagataacggtacaagtggagacggcaaagaccaagaagaagcgatgggaggagattgaaatggaactgtacatcaagcggcaaatcaataaggtgaagcgagcgaatcaacttgcttttcacaagagcagtgttctctgtgcgatagcgggtgggaagaagctgaacgaaattgtcaattctcatgagatgcgagctaaagcgttgtcattgatgcagtccgatcagtgtgtgttgaaagggaagctggatggcaaatttgtcgatcagttgatgaagtggttcaagaacaaattcgagctcgcagacgagcaggttatgggcccaaaaacggcgaaattcagctttactctagcattagaactgttcacacggaaagtggtctgtaagagagattatgttctgctattcttggtttgcatgcgtgcggctggggtcgattgtcgactggtgatttccgccaacgttccaccgaagcgtcctgcaatgaaggatctgtgtcccatctcggaacgacagcttatcgaacagtttgagaaacagtttaaacataaatccacagcaaacgcagctgaacaaattgaggttaaggttgaagaacagaatgtcgaggataaagaatcaattgaaaagattccattgaaagaggaacctgaaaaggctcaatcgccagtgaaagaagctttgaaaaagtcttcgcgaaatgctactaaaccttcagtcaaacatgaaaaattggaaaaagatgaagaacttgaaaaatcttcaaaacccgccgctcattctcattctgaaattaaagtcgaagaaccagctgtgaaatctcgccgtactagagcaaccgcacaaaaatcgactctccagccttctccggaacattcaaaaaagatacgattctctcccgagcccgaaatcctctctggaaagccaggaagtcctgtgaaggagtatactcgacccaaaagagcaattctgaaacgtcaatctccgaggacaggcgaatctcccaatcatgtacccctaaacaccctggtcattccccaagtggacggaatccacgacttgaaagccactcctaagaatgctccgatttctcgccgacttcgaagccgccccaaagaaacgcctgattctaaggccagctctccatttgccaaacgtaaaaccaacaccccgcaagccaaagagaagaacaataaccaaccgggtcggatatccaagaggaaactcttcgatgcccctgtcgaggtccaccccgttccagtaaagcagaaatcctctaaaaataagattctttcgtcggattcgtccgatgaggatcctcctcagaaaccggaagtaccctcgccagcttcaaacaagaaacgtaaaccacgtaacaccaaggcaaagccaccaccatcaacgcattcttcggaggacagcgacttcgaaacgcccggcaaaagaaaagccaagcgtaccaagaaggtcaagagagaatcaccgaaagctgagtcgaagaaagcagcgtcaagcagtaaaacgactaaaacgaagcaaaagaaagcggcggacgaagatgagtcgaatgggggcgtgtctaacaagatgaactattggatcgagttctactcggacaaggacaagcagtggatcacggtggatttgttcacgggaaagatcaactgcgtggattatttggcgcgtcacgccaccagtcccatcagctacgtgttcggcttcgataacgagggtcacatcaaggatgttacgccgcggtacgtccaacactggaacaacgtgagccgaatgttgcgcgtggagcccaagtggctggagaaagccctgaagccattccaggcgaagaaaacggcgcgggagaaacgggaggacgaagagctgaacaaaatccacatcgacaagccgctgccgaccactattgccgaatgcaagaatcacccgctgtacgtgctgaagcgccatctgctcaagttcgaagccctctacccgccggacgtgcccagtctgggcttcgtccggggtgaggccatctatgcgcgggagtgtctcttcgtgttgcaaacccgcgaaaaatggtataaacagggccgggtggtcaaaccgttcgagacggcctacaaggtggtcaaatgttggaggtacgacaaggcgaagaacgagtggcaggggaatcaaccgtgcgatatcttcggcgtgtggcaaaccgacgagtatgatccaccgacggcggaaaatgggctggtcccgcggaacgagtacggcaacgtggaactgttcacgccgaagatgttgcccaagaagacggttcatttgcagcttccaggtctgaatcgggtctgcaaacgtctcgggatcgactgcgccccggccctaaccggattcgagaaggcacgcatgcgcatgattccggtttacgatggcttcgtggtgtgcgatgagttcgctaacaaagtcgtcgaagaatggtacaaagagatggaggaggaggaccgccgggagcaggaaaagttcgaaaagcgagtatacggcaactggaagcgcctcatcaagggcctgttggtgcgccgcaggttgcagaacaagtacaactttgataatctttaa

SEQ ID NO: 549 - DNA, 1196 bp, Aedes aegypti
cgttttacaactgaccagttcgcgtcgctcacaagtagaaaaaaaaagttcgctcaccaagtttcgcgctcagctttaagtcgagtcgaaaccaaacaaacaaaccaaccttggattacgcaatatctcgcggatttctatcatcgcctagtgacaacaataaaaacaacagcagcagcactatggttattgcggcagttagagaaacggtgagcctgtgcttacaaatgccaccgtttgagtacaagaagagcagttctgaagcaagtggtagtgaaagcctaagtgaagtggagataggactggcagcgaagcatgcgttgctacttgccaaaattgaaaaccggttgataatgggcctatctgatgcgattagcaatctcgccaaaacgcccgaagagtttctgttttgcttcatggcaccacccaaacccggagacagtgccacccacatgcacgaggtgcttctgcaagcgttttgcttcgagaacgatatttacataattaaggttgacagtgcagaaaaactaagtcgactgctcggctccagcacggttcaatcgtgtgccctgatccagaaaaattggtcttcggaccatcaaaccgaggtgctctccaaggtcgaagacaaactcgtagactactgcgaagaacactgggaagcgcctgttaagccaattatcaaactaccggagaagtaggccgcgccaaggccaaccgaagtcagtgccaacctgatggaacaaacctaaaaatgcgctaaatatctgcgaaatgaagacggaagatttccccaatctggtggaactcgttcgttcggtgatacgaaatgcaaattagcacagcccatgtgctaaaacacaatcagcagcccaggtcgtgtgcaaagctttaatctttgggattttccccctgaagccgcgcggatgattgccgtcggataatgaaacgatagctgcagtgcagcttctgagcggtgctcaacgtatcatcgacaaagtttgtgattttggctgtagtgtagtcgcgttgtgtagaagaaacattagtagcaattcaagatggttgccaaaaaagtgctggtgaaacagtttccttggcaagaccagtgattggaaaaattgtaaatatgctttacattaaagtgagtttttgtgagatttacaatatagaatcaacaaattgaaacatgaaaa

SEQ ID NO: 550 - DNA, 957 bp, Aedes aegypti
tttttctctgcgaaatagtggtgaattgtgtcggaaaattgtgataaaccggtgttttcgcttgctttttagatgccagctgcggctaagactgccccggccacgaaggccgccccggccgacaagaaagttcaggagaagaaactgccagcggtgccggaatcgaaactgaaggcaaccaaagtgaagacgattgcccgtcccggcagcctccacaggcgtcgtcatctgttggctgtcaagctggtccgccaaaagcagaacctgctccgtgcggccaagtatgccaagaagtacatccggatggaccgcgatgtggtcgagaaggcccgcgctgccaagaaggccggaaacatctacatcccggccgagccgaaggttgccttcgtgatgcgtattcgaggtatcaacaaggtcgcccccaaggtccgcaaggtgttgcagttgttccgtctgcgccagatcaacaacgccacgttcatcaagctgaacaaggccaccaagaacatgctgcgcattgccgagccgtacatcacctacggatacccgacgctgaaatcggtccgccatctgatctacaagcgtggattcgtgaagcaccgacacagccgcattccgatcaccgataacttcgtgattgagcgcaagctgcgcgccggatacaagatgcagtgcgtcgaggatctggtgtaccagatctacaccgccggacccctgttccgtaaggccaacaacttcctgtggccgttcaagctcaacaccccaaccggtggatggcgcaagaagaacaaccattacgtcgagggcggtgacttcggtaaccgtgaggataagatcaatgagcttatccagcgtatgatctaagttgagaccggttaggtggataaggttgcgagagagcgagttaaataaaacaacaaaatacctttaaaaattgaatttatacgtgtaagcata

SEQ ID NO: 551 - DNA, 1083 bp, Aedes aegypti
tcttccaggcgtatgttccccaccgtccgggtgtcgttctccggtccgctccggcaggtgacccccgccgaccgctacgtggtcctcctagacgtggttcccgtcgacaaccggcgctaccgttacgcgtaccaccgttcggcttggctagtggccggtaaggccgatcctccgccaccgccccgactctacgcccacccggatactcccatcggcgcggatgccctccgcaaacaggttatctccttcgagaaagtcaaactcaccaacaacgagatggacaagaacggccagatcgttctgaactcgatgcaccgctaccagccgcgcatccatctggtgcggctcgggccgggccaaaacattcccaccacgccaaaggagctgcaggaggtcgaccacaagacatacgtctttccggagacgatcttcaccgccgtgacggcgtaccagaaccagctcatcaccaagctcaagatcgactcgaacccgttcgccaaaggcttccgagactcgtcccggctgaccgatttcgatagggatcccatggatgcacttctgcttgagcaacatctccgctctccgctgcgcctcttcccggacccgctgatggctcagttcggcgccggccaagaccctgacggcgctcaagctgcccttctggaaaaagcccgtcagcacctgcagatgtggggacgggccgctccctacggtgatctcctaataccgcaaatgtaccaacggccgaatcttggagcgctcaaccttggacatctctggcaaagtcaatggcctcaacagttcccaccgggcttcctaccaaatgctgccgccgcagctgctgcagcagccgcagccgctccccctcctccaccaccaagaaccacaccacctcctccggcccagaccatgaccagtccggccagttccgccggatctccctcaccggatctacgagccaaacacttcacccgcttcagcccctaccaaatcccacaagctcatcaccaccaaccccaaggcctcccaccctccacatccctaccccatcaatccccctctccaagaagtccatcgaactaa

SEQ ID NO: 552 - DNA, 1367 bp, Aedes aegypti
atacgataagcagtagtgcgcgggcgataaaaaccgagaaaagctttattaacagcgtaggtgcgggcgaaagttgtttccttgcgagcttttataccaacaaaaaagttttatagtaacagtgaagaccaacaaaaacgaaacgcatgtaagcctatatcatgatccctccgactacgtccttctaccaacagcagcctcactcggctcagcagtatgcagcttatgtgaacgatccggacaaccaggtgcagacctactcacacggcgaatccggacaacacagcccgcaacccgtcactagtagtcctccggcgccgacaccagctccacttcaaaaagcccctggagttatttacgcttcaccatcgtcaactccggccccccatcgacatcaatcaccatcgtctgaattctccatcgtgaagagcgttgaaacgccagtctactattctccggacaatcacctgaactcccctcccaccattcacttcacacactcacccgctaaacaagccatccaaatccaccatgaaacgcaaacccactatccatccctgacgcatcccaacaacggaatcctgaattacttcggacttcaacacaaacaaccaaccagcctcctggactcttacgtcccaagttctctacaactttcgcccgtcaaacagttcccatatccatccaaacccgccccaatttatcgtccttcgctacaacacttccaccatcatcacgctcccacccaccaacagctgttctaccaaccaacttacccagtctcccattctgcctaccccctctatccatctcacactccttccctccaacctcaacagattccctccgcctcagctccagcctacaacaccattgcctactcggttcctctgtcgcaaaccaaaaccgtcacccagtacaagcggtccccagccctagaaaccgtggccggagttcgatattcccatccacgggcagtttctgctgccgcttcgtcgaagtcaggtgccatcacgaccaaactgcaaccggcagccaagttttaattaagatcttacctgattagtagtgatttgcgaaacgacgaagaaacctcggaatgtgaaaccgtgcagttactcataatttatatgatggaattagatttactcttaccaaatagtgcttaagacacaccgacgacgacgacgatgacggatggcttcctttcgccagatacgatgggatcttgagatttaggtgcagcgcagcagcgttatagaatttagggaatgtatcctatgcaaagtgtttgcaattgtgattcatcaatgtactcaattttgtacagttgtttatttaattgaataaaaagctaattgttaccg

SEQ ID NO: 553 - DNA, 1218 bp, Aedes aegypti
gtaatcatgacagagctaatggatttaagaatgcatcaccacttagcactccagacggagatctatcggcagcggatgctacaaggattaccagatccctatccgacgatgttaccggtgccagcaccaagacccctgatgttgcctccaaggttcccgttgccttcggaggttgacattaagctccagaacaaagaactctggagtcaattccatcgtatcggaaccgagatgatcatcaccaaaagcggaagacggatgtttccctcgatgcgcctgtcgattaacggccttgaagcggacgaaaactactgcgtgctgattgagatgatccccatcagcgattgccgcttcaagttcagtggctcccagtgggtcccggccggtggcgccgaaccgcagagtccccaacggatgtacctgcatccggacagtccggcccttggatcgcactggacgtcccaacccgtggtcttcaacaaggtcaagctcaccaacaacacgctggacagcaacggacatattgtcctcaccagtatgcacaagtaccagccccgaatccacatcatcaaaacgtcggatccttcgcaaatcccgtggtcaccacagtcggcatttaccttcccggagaccgaattcgtcgccgttactgcttatcagaatgatcgtatcaccaagttgaagatcgaccacaaccccttcgcgaagggattccgagaaaccggtcagtcacgctgcaagcggaaagccggcctcatgagcagctcccgctcgatcgaagactccgaagaatccggcggcgaatgcggacccgaacccaagcgccaacgaacggacagtgcttcgctggatgacagtgacatctccgtgagtgacagttccagcagtggcaccagctccccagtcaacgttgacgatctgcaccatcgaagtccttgcccaacgcacgaagacttccttcgagctccgcatccctaccagcagatgctgaaccctgccatggctgctgctgccggctggatggatctcatgctaccgtacttccagcaacctcatcatccaatttctcccgcccatcatcctctgcatcatctaaaacgcgacttcaacgtcctgccatcccttcaagtttcccacaaatccctcgagcgaaccgtcgaatccaccagcaagaaactcggtttcagcatatccgcgatcctgggctacgaccggtaa

SEQ ID NO: 554 - DNA, 2154 bp, Aedes aegypti
atatagtgataaagacgtgctcatacagttcagcaaaattgtgatttttccacccatttcatcccgtgtcttcccgtttcaacattttccctgcaccctgtcggtccaataaaacaaacataattgccgttcttctgtgcttgattagagggagagaagtacacagcactttcaccgatctacatagaagcggcaagttacatgacgcagtaatttttttgttgatgtgtgtccacttgcacgtacctactggacatattgaggtcccctttctggacggaggtagcgatcagttacgatcgagattttgtgacgaacggacgacttttcaaagctttcaaactgaccgccaaaggctcaaagtggagctctcaagagtgacgagtgattttcgctggcaaatgcatacgcaccattgtacttgggtaaagaatcaagccagaagcgttcacaaacgattgcactgggtggaagtgctggacaaggggtaaatttagtggaagaaatcgagaatggcgccaaatcagcgtgacctcgaaacggcctcgctactgactgcaagcaacgataataacaacaatgacaacagcagcagcattcgcagcaacctcaacggcgatcatcgactgaagccatcgcttttggaggttgcgatccgaaacaacatgcgacattacggatctacgcctaatcaatggcagaagataacgcgctatgatccacttcagcaccggaagctggagaaccccacgtccaatctggacactttgattcacatgttgaacgggaatttgggcacgggaatcctggcgatgcccgacgccttcaaaaatgccggattgtacgtcggattgtttggaacaatggctatgggcgttatctgcacccacagtatgcatactttggttaaggtttcccacgaactgtgtcgacggtaccaagtcccatccatgtcattttccgaagtaggccgatacgccctggagtccggtccaagtagcctacagcgattcagtcgcctcataggagtgctcattaactgcttcctcatcatcatgcagctcggattctgttgcgtctacttcctcttcgtagccgtcaatctccatgactttctggagtacatctccatcaaaacggacgttttcaccgttctcttgggcatattgctgccgttgatcgccctgaacatgatccgcagtctaaagctgctcacgcctacttcgatggtagcctcgcttctggctatctccggcatcacgatctcgtccatgttccttctaaaagatcttccgcgcagcacttcggtagcacctgcgtccagttggagcacaattccgctgtacttcgggacggtcatgtatgccttcgagggcatcggtgtgattctaccgttggagaacaacatgagaacgccgaaggacttctgccgctggaatggggtgctcaacaccggaatgaccatcgtagtttgcctgtactcggccgttggtttctacgggtatctcaagtacggggatgcggccgagggaagcatcacgctcaatctgccgagccacttgtttttggcagaactggtacggcttctgatggcggtggccgtattcgcgtcctacgctctccagttctacgttccgatttccatcctgggtccggtcgtcaggcgccagttcggatcgcaccgtgcccaagactacgccgaatacgctctgagggtggcgttggtattgctaacctttactttggcggcgatcattcccaacttgggatcgttcatttcgctggtcggagccgtcagcacatcgacactagccctagtgtttccgccgctgttggagattgttacctattggccgagtcggcagtatgggacgtggaactggattctgtggaaggacctactgatggtggcgtttgggttgagtggattcctgattggaaccagtatgagtgtggttgagattgttacggagtggcagtaagggcctatggacaattaagtaggcaactctattttttataatgacaaaccttttttgttagctattttcgtgattatgtgtgttgacaccggaacaaatgtgttcaatgttttagatatgtttcgttttaaattatttatattattagaaaatatacagtatgctagacaga

SEQ ID NO: 555 - DNA, 2364 bp, Aedes aegypti
tcttcgcaggatttttgctcggtttgaggaggagacccccaacgccacccgaatagtgtgagtgcgtgtgtgactcctggccggaaaacgcgatagaacatttccttagtgtaacaatagtttaacagtgagtaaaaagtgcaaacggcagttgggaggaatttgcgcgcgaaaatcagaagagtctgttcgttgattgaaattcccccaaaaattgagtggcgccgaaaaattattgatcaaatcgaaaaccgttgccgtggacattcgccactaagtggatattggaacgaaagtgaattgactattggacggcagacaggcagttagtgcaccgagtgaatgtgtgtgaaaacgacctgcagataacaattaggagaagtaccgacaattacaacgagttgaaagatataacaccggcagtataacagcacaccacaagagaaatgcagtccctcgtggataagatgagatttctctacaagccgtacgtgctggcggtgctgacgatcggatacatcgccggcgaactcggtcactatctgattggagtaacgtccaaagcgaccgccatcgaactggactacggggaccacgcgtgccagcaaaaccataccgaagttcatcggcatctgctcccacagcagtgcgccgacatcgagctggaacatgaatgccacggtcagcacgtgaacggaacggtctactgcgaatggaactacaatgggttgggtctggagtaccaactgctggccggtcccagcttcattgccgttttcaccgtcatgggggtcgttttgggctttgccgcggaccgattcaaccgggtccgactactggccatttgtacactggtctttggcattgccatcatcttccagggcacggtcaaggactactggcagttgattctgctgcgtatggttatggccgctggggaagccggatgcaatccactggccaccggtatcatgtcggacattttccccgaaagcaaacgcgccctcgtcatggccattttcaactggggaatctacggtggatacggaattgctttccctgtgggccgttacattaccaaactggatatctggggacaaggctggcgtatttgctactacggaacgggagtgttggctctcatcatggccgtactaaccggaaccaccctgaaggaaccggaacgacagagcatcggagaggaagcgtctggcaagggaaaagtctcgctggtcaaggccctgatgcagccacgtgttattctgctgatgattgcggcctcgattcgtcactgcggtggaatgacctttgcctataacgccgatctgtactacaacatctacttcccggatgtggatctcggctggtggttgtttgctgtgacgatcggaatcggaagcatcggtgtggtcattggtggaatcgtctccgataagttcgtggccaaaatgggaatccgctcgcgagtggcttgtctggcgatcagtcaacttattgccactccgttcgccttcggttccgtgtatttcgatccactttgggcgatgatcaccctgggaatcagctacttctttgccgaaatgtggttcggaatcgtgttcgccgtgctggtggaaatcgtcccgctgcaggtccgctcgacgaccatcggtgtgttcctgttcgtgatgaacaacatcggaggaaatctgcccattctggttgacccactggccaaggccattggctaccgaggctcggtgatgttcttctacgccggtttctacggtatcagtaccgtgctgttcttcattacgatgttcttcatggacggacccaagccggaaccagcgatcagcggcgacgagcaccggaaccaggtggaaatgggccacgagaacaataccttccagccggacgacttcatcaacggtatcggaggaccgaagaccaacggacacaacatcgtgaacgtgaggccttccgagagcagtagactgtagaaagtgacacgagttcgcagcagcgcgaatgatagttagggtttttaacaaataatcttaagctagaatattcaaaggacaacatgatgaatctaccgagcaggaatcatagaattattgtaacataatatgtacggttagctttccccaggctgtggaaaggaatctcatattcattcagattgttttataattcgtcgctctagaatctagaaaccgtgtacctctggcctgacggttttctttttcgttaaccgaagatctgtacaatggcaacgttcggagtgccaagctacgtgtatagttgatttgtatttaaagtggaagtgataacttatttccttcagacgtgtttaaacaataaaacaaaattttatacaaa

SEQ ID NO: 556 - DNA, 999 bp, Aedes aegypti
acgttgggaccaaaatggcgtaccttcgtagcgaacatgtcgatcgccctgttcttcaccgccgcctcttgtgctctcccatggattgcgtactatctcgccaactggaaaatcttcgccattgttacctccgctccgctggccttggccatccttaccccatggctcgtccctgaatccgcaagatggctcgtctcccagggcaaagtggacaaagctatcaacatcctgaagaagttcgagaagatcaacaggaagaccgttgacgccaaagtgtatcaggatttctccgaaagctgtgtccgcttgcaggaggaagaagccgctaacaatagctactccgtgctggacttgttcaagaccccacgccttcgcaacattaccattttgcttattgttatctggatggccatctcgctggtattcgatggacacgtgcgtaacgttggatcacttggactggatctgttctttacgttcacggttgctgcggccactgaacttccggccgataccttcctcactctgactctggatcgctggggtcgccgttggttggcctgcggaacgatggttgccagtggtgtgttcagcctactcgccactaccgtgccagttggtaagcgttactcgatgatcgttcttagggcttattccgctacgttggccattctgggtcggttcagcgtcaacatctcgtacaacattggactgcagtatgctgccgagctgttacctaccgtggttcgagcccaaggtgttgccttcatccatatcatgggatatgtggccagcattgtcgctccattcgtcgtatatctggcgcacatttcgcctgctatgccgctgattgtgctgggaatcttgggaatctttggaggacttctgtccttgatgctgcccgaaactttgggacacgatctgccgcaaacgctcgcagacggagaagaattcggacgtgggcagaagatctgggatttcccgtgcttgaccaagtat

SEQ ID NO: 557 - DNA, 2512 bp, Aedes aegypti
tgcaaattcagttcaacgagcgcgacgagcaactgcgaatccagtttcattccaagtgcgataaaagtcagttgattcagaaagaacggtaggcgccaaaatggtactgaaacaacggggagcggccatagagctacactctcctacggaggatgtgctggtcagtccgggaaccgagagtttgccaccgatcgaaaatggagccaccgccggttccgggacgattgatggcggcggaggaaacgaacgtgtcaaaatgaaaaaagaactggggctgctggaaggagtggccatcatcttgggtattatcttcggctcgggaattttcatctcgccgaagggtgtgcttcaggaggttggcgccgtggggacttcgctggtcatttgggtgacgtgcgggttgctgtcgatgattggcgcgctgtgctatgcagaactgggcacggcgataccgaaatccggtggcgattatgcttacatttatgaggcttatggcccacttccggcgttcctgtatctttgggacgcaacggtgatatttgtaccgagtacgaacgccatcatgggacttaccttcgccagctatgtgttccaaccgctgtttgcggccggatgttccgttcccacgatagggctgcagttgtttgccgccgtgacgatatgtttgctcacgtacatcaatgcttacgacgtccgggtgacgaccaaaatgcagaatgtgttcatgttcaccaaaatcggtgctctggtgctggtcatcatcgttggtgtggtgtggatgtcgctcggtggaacggagaactttgagaacgccttcgagaacacggaaaccgaccccggcaagctggcggtggcattctattccggtatcttctcgtatgctggatggaattacttgaacttcatgacggaggagcttcgtgacccgtacaagaacctgccccgagcgatctacatctctctcccgttggtcaccggtatctacgtgctggccaacatggcttacgttgcagttctatcgccgcagcagattctctcatcggatgctatcgccgtgacattcgcccagaaggccatgggctggggtgccttcgtgatgcccatcctggtagctatttcggccttcggtggtctctccgtgcacatcatgacctcatcgcgaatgtgcttcgtcggggcccgcaacggacacatgccggagatcctctcccacatcaacgtcaatcggtacactccgatgccgtcgctggtgttcctctgcctcctatcgttgctgtacctattcatcagcgacgtgtacgtcctgatcacctacagcagtatcgtcgagtcgttcttcatcatgctctcggtgagtgcggttctgtacttccgctacacccgaccggacatcaaccggccgatcaaggtccaactgtgggtcccaacgctgtttgtcatcatctgtgcgttcctgatcgtggtcccgtgctacgtggcaccgtacgaagtgggcatgggtgtcctcctgacgctggccggtattcccgtgtactacgtcggtgtggcgtggaagaacaagccggaatccttcgagaacgtcctgcgccgggcgacacagttctgccagaagatgttcatgacggccaaagaggaaaatgatgacgaggaatgagaggagcatgcccggtaatgtacagcttacagttttaattagtagtgccgacgcaaagtgatagtaggtttgactattttttaattagttaacgtgaccaaacaaaatttttattctcggacgaaatttaaatctcaatcgttatagatctgttttcatcaattgacaaaattttagatcagtgccaaatatgtttggagtcgattttggatcatacactcccacggttttttgttgcgatgaaatcgcgaaatcattagtcaaaattgaaaatttactttatgtttccacatgtgcgtccagttccagtacttacaatttaagtcagacaaatcaaataaaaatgtactttataatctccattgcattttgtgtaagagtctccatcaacgaaccggaaaccgaagtgtcccggtccggtatgatacttcttcataagaagtcaagcaaacgaaagtgtagaatattttcactcaatcctataatagaccaatgaggtttaagctaaaaacaatacgcttttgagcttttctctatcaaacatcacaccgatcaattagaatctcatgctcatgctatatgttgtcggacttgcggcgccagattgtaacaagaactggtttgatatctagaagcaaaacatctcactgaaagagggaaagacaaaagataagactattatacatacacaaacactcgaataaagcaaactgctcgtagttagccgttgaagttagcatagtgcgagtatggaagttttgaatagaaacgtaagagattgaataacataggttaagtttgcaagcaatgccgacaaatacccattatgataataaaccatgctagattttttgttaa

SEQ ID NO: 558 - DNA, 1868 bp, Aedes aegypti
aagagagccatcgcttcgttggaaattcgtctaataataatagcagtcggaaacatcgggatcaaatttatgaggcaatcaaacaaaatcagccacagaattcacaacgtatatcagcacgaatcacgcacactgctgagagcatcacaacatcaccagttcctccagccagacagaggtggagcaagtgaaagccacccaatcgcgtcatcatatcaatacaaaacactgaacgagcagctctagccgagtcgagattgtagcgagagagagagagtaacgaagaaaccagagaccgaagcggacatcatcgcaacccagtcctgcctttttcaggtgtgacaaagataagcgacaaaattgcgccaaacgataagaagactcaactgcagaccaaatcgtcatcgtcgtcgtcggaaggagagatggcatcggctctaaaaagtcccacggcaccaaccggggctggcggaggcaagttcagctggatggcccacgtcaagtacgaacatctgatggccggagtttccggcggagtaacatctacgcttctactgcacccgttggatctgatcaaaattcgcttcgcagtaaacgatggccgaacagcaaccttgcctcagtaccgaggactcacaggagcgtttctcaccatctttcggcaagaaggcttccggggtctctacaaaggcgtcacgccaaacatctggggatccggaagtgcatggggattttacttcttgttttacaactcaatcaaaacgtggatccaggacggcaacacggcccaaccattggggccggccctgcacatgctagcggcagccgaagccggcattctgaccctggtgatgaccaatccaatctgggtggtgaagacaagactgtgcttgcagtttaacgaacccggacagaagggctatgccggcatggtggacggactgaagaaaatctaccgaaccgagggcatccgggggttgtacagtggattcgtacccggaatgttgggagtgtcacacggtgcgcttcaattcatgacgtacgaagagatgaagaaccgctacaaccaaaaccggaagcggcccatcgatgccaagttgaccaccgtagagtatttgacgtttgccgccgtctcgaagcttatcgccgctgcagctacctatccatatcaggtgatacgggcccgcctgcaagaccagaaccacaattacaagggcacatgggactgcatcaagctgacatggagatttgaatcgtggcgtggcttctataaggggctcggtccgaacttgttgcgcgtaacgccggcgacgatggtcacgtttgttacgtacgagaacgtgtcgcgctatctgttggccttcagaaagtcgtagattagaaggcttatctagtttttacgttattatgtgtatcagttagtaggttagttagcgccaaaattgcccaaactttaaccgcattgctcgatcttttcacccacgacggaaaagatcgctcgccgcaatgacccatccgatactggactggactgcactaaacgggaaatgggcttttcaaaagcgtatccattttccctccgccggacaaaaccaaattattctagctgagttaggatcttgtttgccataggtagttaaaatacgcaattggtggcatcggatgccccctttttagttttgttctgtttggttcgttcctaatatacctagtgaatgtaaatttaagtgaggatccaccccagtggaaggacaatacagcagcttctgttctggagcgtctcgtttcgaggcaagtcacaatccagaatagttcagcagattggaatgaacgacctttatgctttagtacacgccagtttctattac

SEQ ID NO: 559 - DNA, 1179 bp, Aedes aegypti
atgattctggagtacgttggaccaaaatggcgtaccttcgtagcgaacatgtcgatcgccctgttcttcaccgccgcctcttgtgctctcccatggattgcgtactatctcgccaactggaaaatcttcgccattgttacctccgctccgctggccttggccatccttaccccatggctcgtccctgaatccgcaagatggctcgtctcccagggcaaagtggacaaagctatcaacatcctgaaaaagttcgagaagatcaacaggaagaccgttgacgccaaagtgtatcaggatttctccgaaagctgtgtccgcttgcaggaggaagaagccgctaacaatagctactccgtgctggacttgttcaagaccccacgccttcgcaacattaccattttgcttattgttatctggatggccatctcgctggtattcgatggacacgtgcgtaacgttggatcccttggactggatctgttctttacgttcacggttgctgcggccactgaacttccggccgataccttcctcactctgactctggatcgctggggtcgccgttggttggcctgcggaacgatggttgccagtggtgtgttcagcctactcgccactaccgtgccagttggggcttattccgctacgttggccattctgggtcggttcagcgtcaacatctcgtacaacattggactgcagtatgctgccgagctgttacctaccgtggttcgagcccaaggtgttgccttcatccatatcatgggatatgtggccagcattgtcgctccattcgtcgtatatctggcgcacatttcgcctgctatgccgctgattgtgctgggaatcttgggaatctttggaggacttctgtccttgatgctgcccgaaactttgggacacgatctgccgcaaacgctcgcagacggagaagaattcggacgtgggcagaagatctgggatttcccgtgcttgaccaagaaaatcaacgacgacgaggtggatgaccttccggtggagcgtttcacccgggccacctcgaagacctctatcggcgcctcgttgcgtgcgtcgacgcgtggcgaactgcgctccagtatgctgaaccgttcaatccgttcccgcgtctcggtgcgttctctccagcagcgttcggatcagatgtctgctatcgtgtga

SEQ ID NO: 560 - DNA, 1349 bp, Aedes aegypti
cacggctcgggactcacccgacaaatcgtatccgtgtgctatttcccgagaaaacagtacgcctcgtggagtgaactttgcagggattcgattgagttgcatggttttgacgaaaaataactcacgatgagagaaattgagtgggcaccactgaatgtgcccttgcgacgccggctggagacgctctgtgccttcggatggatgagtctgtttctgttcggtgagctcgggatgctgttcacctatttatacctattgatattcggtggactgctcgcgaaaacgttctgtctcatctatggagcgttcatctactacgatcggaaagctggcgtcaacggtggacgaggacagggcgtcaaatggttccgcaacctgttctgctggaagctcttccagacgtacttccctgccaaactgcataaaacggttgacctgcccgcggatcgcaactacatcttcgctgccttcccacatggtgtactcagcaccggaacgttcctgaactttgccaccgacaccacgggattctacaaactgtatccaggcatccggtcgcgaccatgcacgctgaacttccacttcatcattccgttcttccgggagattctcctgagctggggtctcgcttcgtgtgcctccaaaagcgtcatgtccatgttgacggcttccaacaatccacaccatccggccaacaaagacggtcgaactgccaatgccgttgtcctggtggttggtggcgccgctgaatcgctgcattgccggccaaacaactaccgattggtgctcaaaaatcggaaaggcttctgcaagatcgctattcaggccggtgcctccgtggtgccagttatcaactttggtgaggtggacctgttcgatcaaccgccgaatcctctgggctccccattacgcaatttccaggagtgggtcaagaatacgaccggaatcgctccggcagcattccgcggtcgaggattcttccagtacacgtacggtgtgatcccaaggcgacgaccgatcaacacagtcattggagcaccgttgcatactcagaagaacgacaagccatcccaggcagagatcgatgatttgcacgaaaagttctgcaaatccttggctgacttgttcgagaagaacaagcccaagttcatcaaggactacaagaacgtccaggtggttctggagtgatatggttaggataacgaattgcctacctacgacattaaatattccaaagtaagagtgctctactagtcgcaaacaaatgtgttgcataaacaacggtgccatgggaaacaaaattagaatggttgagaagctttaaagttcaataaatgaattgaataatc

SEQ ID NO: 561 - DNA, 2470 bp, Aedes aegypti
gtaaatatacagttcgtttctgctgacggcgactcgcaggatttgcagctatttgtccaaccggaatggataacctcgttcagaatcgggggcgaaagcccgccaccgtggtaaaacgccaaggcgaatcaaaaacctatcgggtgcacatcgctctgggattgtttctggtgatgctgtggttgtctttcccgacgctttgttccggccattatgagcacgatcatcatgaccaccatcacggccacgatgaaaacccgagcttcaagtactcgagacaagctaatgaaatgtatgaagaggccagtcatgatcatcatcatcaccaccatgatcatgatcatggacaccatcatgatgatcatgatcaccatcaccaccatcatcatgatcatcaggaagtgccgaaatcaaaggataaaccccaagtcgataccttctacatctgggttcattcgctggggtctaccctgctgatcagcgcagcgccgttcttcattctctttgcaatcccgctcgataacacggaagagatgcaacctcggttgaagactttgttggcctttgcctccggagggctgctgggtgatgctttcctccatctgattccacatgccatccagccgcactcgcacgacgatgatggccacgggcacagtcatggtcacggtcacagtcatggccatggtcatgaaggtgaggatggccacagccacgatatgcgcgtagggctttgggtcttggctggcatcattgtgttcttggcggtggagaaggcggttcgattaatcaagaaggatgctggcggacacggacatagtcacggaggacattccaagaaggagaagtcgtcgccaccaacttcgccgtcgaagaaagagaacaacaaagtttccgacaagaacgacaagaaaaaagtggaagccgaagctgccaaggccaagggcaaagccgtcaagaaggaacacaagaaagatcaaatcaaaatagccggttatctgaacctggctgcggatttcacccataacttcaccgatggccttgcgatcggggcttcgtacttggccggaaacagtatcggtatcatcactaccattaccatcctgctgcacgaagttccccacgagattggagattttgccatcttggtaaaatccggatgctccaaaaagaaagccatgctgctgcagttgactacggctgtcggtgccctggccggtacggtcttagccttattgggcagcggaagcgacgctgccgaatcttgggtgcttccgtttactgccggtggattcatctacattgccaccgtgtccgtcattccggaactgctcgaggaatcgaccaagctgtggcaatcgctgaaggaaatcaccgccctgttggccggtgtcggaatgatggtaattattgcaaagtttgagtaatatgtccaccttcctcgaactctctgtctgcgtgtcacttaaactgaagtgtgacgtcattcgtgtttggcgggaagccgcgtgtttgagaaaagtgcaaaaggatttcttaagtacgtctcaagtaataattgcttgacacaatgtgatcaatttcgagcgtttaacgttaaactaaattgaactaaactaattaaatcggagaacaatatcgcataaatagggaaacaaattggaaacctatccccataagttatgtttaagataatctactagagagcaataaataattaatccacatcgtacaacaaagcgcaccattgacttgtgatctcatccgatgacctttctcaaacacgtggccacgcaattggtacaggctatggcgtctctcttcccttgtctgtgaatgtttggcccggtaccttatctagtttggttcaatttgaagaggagcagatagataggtagttgtaaaaaatgtattgcctttatctagatcacgataactgactcccctatcgcatacgactgtcttctattactaattttctgattctctcaccacttactaaatcaaaaatacctaaaaggtattcgttataactgtattattactcgttaaactcataggggacatgcctgaaagccatagaagaaacgattgaacgctgagtgtaaaatcgccgtttgtgctagtgcaatatgttgattttaatctgattgttctgtttgtttaatgtttaggaaaaaaagaagtaaaaatatgttaatattttattaaagtggagaataaagttaaggaaatatgtcctactaaaagtaatccctaattaaaacggttgcactaacacaaattggagatctttttggcgtcaaaataagattgagaacttgttttatacggaaataaattcagtcggattttttctcaaagaggtgaaccagcctaaggctgaaagcctttataataaagaaaatcaaatcattcagtctgattcatgtctaagcaacagcgtatattttagaaacaaatacatata

SEQ ID NO: 562 - DNA, 2434 bp, Aedes aegypti
agacttccatcaaaagccccggcttagtcatcgcgcaaccggcacctaatatgtccaccccctcatgctggaagattctgacgcgaaagaaaattctctcgatcgaagccgacggcgctgctgacaatggcaaactgggacggatattgaacacctatgatttgacggcgctgggcgttggggcaacccttggcgtcggcgtttacgtgctggccgggcatgtctccaaagatcaagccggaccgtcggttgtgctgtcgttcctgattgctgccgctgcctcctttctagctggcctctgctacgcggaattcggagcccgagtaccaaagtccggttcggcctatatctacagctatgtatgtatcggcgaattcatggcattcgtcatcggttggaacctgatgctggagtacatcatcggatcggcaagcgtctcccgagggttgagcctgtacatcgacacgctcgcaaatgacacgatgaagatccggttccgggagatagctcccatggagtgggactttatgtccagctatttcgatttcttcggattttcagtggcgatcttgttgggagtcgcactggcattcggtctgaagaaatcaaccatggtgaacaacttcttcacggtactgaacattggaatagtgttgttcgtgatcatcgctggagcacttaacgcggacatttccaactggaacgttaatccggcaaacgtgtcaacgatctacaacgttggcgaagggggattcttcccgttcgggtttgaggggactttgaggggagcagcgacctgcttcttcggattcgttggatttgactgtattgccacgaccggagaggaggtcaagaatccccgcaaggcgatcccgagagcgatccttctatcgctgtgtacgatattcttggcgtattttggagtatccacggttttgacgctgatgtggccttactacaagcaggacgtcaacgcaccgctgccgttcgtgttcaacgaaatcgggtggacctacgccaagtggacggtggccatcggaggaatcatcggattggttgccagcttgtttggggccatgtttccacagccccggatcatctacgcaatggcccaggacggactggtgttcaaagcgctggggaaggtcagctctcggttcaagactcccgtgttcgggacgctttgcgcggcgctgctgaccggcactatggccggtttgttcgacttgaaagctctagtcaatatgctatcgattggtacgctgatggcgtacactgtggtagcgatctcaatactcattctaagattttctgaagcaccacaaacagcctccatcccatctaccagtaagcaagtgttcgaatcgtcgaacctcctcaggtcaggtggccgcctgacgggttctgcttttatgcgacaacttttcaacatatcctgcgtcaggataccttcccatgcctccactagtgtcgttggagtgctcgtcaccctttactgccttgtatccttggccctctccctgacgatcttctacgccaagcaacctctctacgacatggaaccgtgggccttgaccctggccggtactcttctcggcctgctgctgctcatcttgcttctgatgtcgattcagccgcgggaaacggctgaagcaccgttcaaggtcccctttgtaccgctgttacctgcgatcagtatttttgtcaatatctacctgatgttgatgttggacgtctacacgtggattcgcttcggaatctggatgggaattggtttggccctgtacgcgttctacggattccgcaacagctaccgcgatgtctactcctgtcgccccggatggaccaaactcaagtatgggcactgacgtcatctgagtcatccctcgtaccgtaaaagaatagtgagcaaaagtgatattttcctttcctgccggaagccaaggaacaagctggaaaattgtgttattatcgagctagagaaatgattatttatgtatccaaatatgcaacagtagtagaggaaaaagcccaataaaacttgaactaggttaagcgaactgtaggaaattagataagagagccacgaaaataaaacttgccatatgtacagaaaaatatatatagaaaaagagagagaggttacgtatcaaatggacagcacggctaattagtggctgtttagctaatctgaatcgatcttcgccaacggtgaaccccaacagctgtccaaatcagtggagagtagataaaagaaaccaaaacattcaccatacacgctttaggagataaccataaccatatataggacacattccaaaaaggttgaacacagaaaattgtaacatttaacacacacgcagagcagagagggggttgtaagatgatcaaacgaaagaaaaatccataaatgaaaacgaaaaatcacccgctt

SEQ ID NO: 563 - DNA, 2322 bp, Aedes aegypti
atgtggcggatcgatgcaaaaccgatcgaagcgggagatttggacgggaagctgctcgggggaagtggcttcagctcggtgctgcaactgaacgatctgcagaataacgtgaaaatgaactctcaaaatgctctctgcaatggctccatcatgacaaatggacaaaccaaggactcgaatctgcggaaagtccttaataacagcgaaaacggccaaaaaaagggcatggcctcgctaacacatctaccaaagaggccacccatcgacatcgagtttaacgagttggcttactcggtgtccgaaggtcacaaacggagctacaaaaccatccttaagggcatcaatggcaagttccgttccggcgagcttaccgccatcatgggtccgtccggggccggcaagagcactctcatgaacatcctcgccggctacaaaacctccaacctaatagggtctgtcctaatcaacggcaaggaacgaaacctgcgaaaattccgcaagctgtcctgctacatcatgcaagacgaccggttactaccctacctaacagtgcgcgaagccatgatggtatcggccaaccttaaactgggcaaggacatatccctggacctgaagaaggaaattgtcgaggaaatcatcgaatccttgggactgttggacgcggccagtactctggcactaaacctgtccggaggccaacgcaagcgactgtcaatcgccttagaattagtgaacaacccacccgtcatgtttttcgacgagccgaccagcggcctggacagtgccacctgttcgcagttgatccacctgctcaaatcgctagcccgaggcgggcgcaccatagtctgcaccatccatcaaccttcggcgaggatattcgaaatgttcgacaatttgtacgtgctagccgagggacagtgcatctatcagggcagggtcaatgggctggtgcagtttctggcgtcaattggactggaatgtcccagctatcacaatcccgccaattacgtgatggaagtggcctgcggagagcacggagactggaacagcaaactggtgacggcagtcagcaacggcaagtgcaacaactacaatcaaccggtattagctcccaatcaatcgcagataaatctaccactagcgagtgaccaacagacggagaagatcgtgaaggccctgtcgctgggagctggcgaagatgacctggtcaaaccctcagccgtcgagttcaccaccatcaatatcgaaccgctgaacaatgagagcaagttttcatcctctgcggttgttagcagtagtaaaacggttgaagaatcggtcagtggaaccagtacggggaaagggacctccgagggcggaggaactatctcaacgactgccgggggacctacgaccgcttcgtccaaaccaacctgcaccacttcgctgctggattcgaccgaaagcgtgagcatcgaggtgccgaaaaagatggccggcttccccacgtccggctggatgcagttctggatcctgttgaagcgaacgttcatcacaatcatgcgggatcaaacgctgacgcagatgcgactggtgtcacacgtggtcgttggggcgattattggaatgatctactacgacattggcaacgatgcggccaaaattatgagcaatgccgggtgcattttcttcaccacgatgttcaccatgttcaccgcaatgatgccgaccattctgacgtttccgacggaaatggccgtatttgtgagggaacatctcaactactggtactcattgaaatctttctactttgcgaaaacggtagccgatcttccatttcaagttctcttcaccagcgtgtacgtcatcgtcgtgtactacctaacgtcccaaccgatggaaccgaagagggccggaatgttcgtgctaatctgcatcctgacgtcgttggttgcgcaaagcctggggctgttgatcggcgccgggatgagcgtggagactggcgtcttcctcggtccggtgtccaccattccgatcatcctgttctccggcttcttcgtcaacttcgacgtcattcccaagtatctgcagtggttgacctacgtcagttacgtgcggtacggctttgagggggcgatggtctccgtctacggcatgggccgagagaaattgagctgcacggagatctactgccactaccggagtccacagaagttcctggaggagatgtctatggacaaggccgagtactggatcgatgcgacggcactgttttgcctgttcatcggtctgcgcgtcgttgcctatctggtgctgcgctggaaactgcattccatccgttaa

SEQ ID NO: 564 - DNA, 1479 bp, Aedes aegypti
gtgtgtttcgtgtgtttccgcgcgttgctttctcttggataatttcacaaagttttcgtgaattgtgccgtaaaaatcgtgttaattcaacagaatattttctgtaattgtttgccagacgcacactgtttgcacaaggctccaccctggggaaaatggcgaaacgcggtgcccaatcggatctgaaccacgacaactggaacgaagaggaagaaccggaggaggctggtaagtttgctatcgcctccgaggatgaactgaagaagagggtcatcaaaacggctcggcgtcgcgttaccggggcggattccggctcgtcttccggtggcaccggttcggtgttcagcggattcaagggattctcggcggttacctccacgccggctgcacccttggccgctggaaagacgagtaaggatggagccagtccgttttcgttcttgagcaacatcagcaaaccgacgaacggaacggcggcgggaagttctgtttctagtgccacaacttcggcgcttggggcaagcatctttgccacgacggatcctaataagaagccgttttccggctttggaagtccaccgaaggctccggcagctgctccggcggttgtcagttccggggacaagaaggaagatgtcggtaagaccgatgattacgtggaaagcatcaaagcgttaaatcaatccgtagcgacttggatttcggacaaggtgaaggagaatccgctctgcaagttgactccaattttcaaggactacgaaaagtacttgaccgaaattgaatcgaagaaagataaggacgagagcaaggattccgcttcaccggctccagcagccgccaagacaaccggattcactttcggaagtgtgtctccagcagcgcctccggcttcaactaagacctttagctttggaataggtgcttccacagctccatcaaccggaactgggttcacattcgccaacgttaaacctcccgcattggagcaaaagtcggacgacaaagaggagggcgaagccgacgatgatgaacccccgaaagtcgagttcactccggtcgaagagaaggacagtctctattccaagcgctgtaagctgttcgtaaaagtggacggtaaattcagcgatcgtggcgtcggaaccgtacacatcaagaaggtggattccaaggtgcaggtcctggtcagagcggacaccaacctgggtaatatcctactgaacatcattctgaacgaatcggttcccctgcaaaggatgggcaagaacaacgtgatgatggtttgcctgccaacgccggaatcgaaaccgccgccaacgtcggtgttgctgcgggttaagacggccgagggagcggacgagctgtatgagacgctcaagaagcacaaacccacttagagggtggaaggtaccgattgaagcagaaagcgtgtattcctgaatagtaaataaattatgacatattgatggttaaggaaaattg

SEQ ID NO: 565 - DNA, 5229 bp, Aedes aegypti
atggataagtcgaagaaaccaccgacaacagctggcggtggagcagctggtggagccccaggacctggaggaggaaaaaaaggtggccctggagcaggagcaagtggcggcggcaaaggaccgcccaaaaagcccagtgatagtgacgcaccgggagccggcgctaaggcggaaggagatcccagtggaccgggtgccaccaaggatgaaacttccgctgcggcaaacggcgacaaaaaatcggataaggctgacactgagcaaccatcgcagccgaagcctggcagtgctggagcgacggtccgcgacggtgcccagaaagttcttaccctggccatgaagagcgaatgggctcccgttgaagctgtgctgaaaggcttggagaaggcggtagccgccggcggagaggacgccaacacaaccccgctagccggggtcatggatccggccaccggaatgacaccgctaatgtatgccgtaaaggacaaccggacatcaatcttagataggcttatagaacttggatcggacgtcggagcgaggaataatgacaattacaatgtgatacatattgcttccatgtactctagagaagatgtagttaaattacttttaaataagcgtggcatcgacccatactccacgggagggtcacggcaacaaacggctgttcatttggtagctagtagacaaaccggcactgcaaccgctattttacgggcacttttagctgcggccggtaaggatatccgaacaaagactgacggtaaaggcaaaataccgctcctgcttgctgtcgaggctggtaaccagtctatgtgcagggagttactatcggcacaaacggcggatcaactgaaggccactaccaacaatggcgatacggcattgcacctggccgcccggcggaaagacgtcgagatggcccggatccttttggattacggtgccaatgtggatcttcagaacggcgatggtcaaacggcactccatatagcggcggccgaaggcgacgagtcgatggtcaagtacttcttttcagttcgtgcttctgcgggaatcatagataatcaagatcgcacaccgatgcatctcgcagcggagaacggtcacgcgtcaatcatcgaaatcctggcggacaagttccgggccagtatctacgagcgcacaaaggacggaagtacgttgatgcacatcgcctcgttgaacggtcacgctgagtgcgcaacgacgctgttcaagaagggagtctacctgcacatgccgaacaagggcggcgcgcggagtatccacaccgcggccaagtacgggcacgtgggcatcatcagcaccctgctgaacaagggcgaaaaggtcgacgtgcccacgaatgacaactacactgcccttcatatcgctgttcagtctgccaagccggcagtggtggagacgctgttggggtttggtgccgaagtgcacgttcgaggtggaaagctgagggagacgcctctgcacattgctgcccgagtggcggatggggaccgatgcgcgcttatgttgctgaagtctggagcaggtgccaacaaaacgactgacgatgggcagacgcctgtccacgtggctgccaagtacgggaatgtgcagaccttggatttgctgctggaggataacggtgatccactgataaagtcgaacgttggcgagactccgcttcacttgggcgcgcgaaattgtcatccagctattgttaggcacctgatagactttgtgttacagaagcatgggaaggaagtgttgaagagctacttaaacttcacaaacgaggacggagcgacggcattgcactacgcctgtcaggtgacgaaagacgaggtgaagtctggaacgggcgatcgggagatcgtgaagatgctgcttgagaatggggccgacgtatcgctggcgaccaaggccacccaagagacatgttttcacgcggtttccgtagctggtaacaacgatgttctttcagaaatgattaaccacctttcgactacggatatccagaaagcgatgaatcggcagtcatcggtcggttggacaccgctgttgatcgcgtgtaatcgaggtcacatggatttggtgaatacactgttagccaaccatgcgagggtggatgtgttcgataatgaaggccgatcggcacttcacttggcagccgaacatggctacctacaagtctgtgatgcactcattaccaataaggcgtttattaattctaagtcacgagtcggtcgaacggctctccatctggccgctatgaacgggtacacggaattagtcaagtttttgatccgagatcacaacgctgtggtagatattttaaccttgaggaaacagactcccctacatctggccgcagccagtgggcagatgaatgtatgtaagctacttctagaactaggtgccaatatcgatgcgacggacgacgttggccagaaaccaatccacgtagcagcacaaaacaattactccgaagttgccaaattatttctccagcagcatccaaaccttgtcatggccacgagtaaagatggcaacacttgcgcccatatagctgccatgcaaggttcggtgaaggtgatagaggaactgatgaaattcgatcggaatggtgtgatttctacgaggaataagctaactgactcaactccactgcaactagctgcggaaggcggtcatgcggacgtcgtcaaggtccttgttcgagcaggggcttcctgtaccgacgaaaacaagtccggtttcaccgctgtccatatggcggcaaaaaacgggcacggccaggtgctcgaggttatgcggagcactaattcgctaagggtgtccagtaaaaaattgggtttaacgccgctgcacgtagctgcctattacggtcaagcggacaccgtgagggagttactcatcaacgtacccgcaacggttaaatctgattctccatctggcacatcattagtacctgaattagggaacgaatccgggctgactccgctgcatctggcagcgtactccggcaacgaaaacgttgttcgactgctactcaactccgctggtgttcaagtcgatgctgcgactacggaaaatggttacaatcccctgcatttagcgtgctttggtgggcacgtaccgatcgtgggccttctgctgagcagatcggccgagcttctgcatagtgtggaccggcacgggaagaccggtctgcacatagcggctatgcacggacactaccagatggtggaggtcctgctgggtcaaggttcggagatcaacgcctccgacaagaacggctggactcctctgcactgcactgccaaagccggtcatctggatgtcgtgaagctgctggtggaagccggcggatcacccaaatccgaaaccaactacggctgcgctccgatttggttcgccgcttcggagggccacaacgacgtgctcaagtatctgatgcacaaggagcacgatacctatgcactgatggaggacaaacgattcgtgtacaacttgatgatcgtctccaaaaatcataacaataagccgatcgaggagtttgtcctggtttcccctgcacccgttgatactgccgcaaagttgtcaaatatttttatagttttatcgactaaggaaaaggaacgagccaaagatctgatcgccgccggaaaacagtgcgaaacgatggctaccgagctgctggcgctggccgccggtgcagactcggcaggtcgtattctaactgccaccgatcgacgcaacatggagtttctggacgtgctgatcgagaacgagcagaaggaggtgatcgctcacacggtggtgcaaagatatctgcaggaactctggcgaggcacgctcaactggacggcgtggcgaataatgttgctgtttgtcggcttcatcgtgtgccccccggtgtggatcatcttcacgttgccgctggggcacaactattacaaggtgcccatcatcaagttcatgtcctatctcacatcgcacatctacctgatgatccatctgatgattgtgggcataacgcccatctatccggtagtgcgagccagtctcctgccctactggtacgagtggggcctgctgatctggctcagcggtttgctgttgttcgaactgaccaatccaagcgacaaatccggtctcggaagtatcaaggtactggtgctgctatttgggatcatcggggtcggggtgcacgtgtccggtatgctgtatgtgcagaaaacctattggccaacgttgctgtactgccgaaatcagctgtttgccctttcgttcctgttggcgtgtgtccagattctggactttctgtcgttccatcacctgtttgggccttgggccatcatcatcggagatctgctcaaggatttggctcggtttctggccgtgttggcgattttcgtgtttggcttctcgatgcacatcgtggcgctgaaccagtcgtttcacaatcttagtcaggatgaggtccgacggttacctctgtcgacgaggaataaggaaatcttcagcgatgacgaaaacagcgattatcatagcgacgaggttgagcgtataaaacgagcggccgctggccaatccgtaactgattatcgtcgtaaacacaaaaccgacatcccgatgacgccaatcatcgccttcgagcgcctgttcttcgccgtcttcggtcagacctcaccggacgacatcaactcccagcggtcgacgcgtcccgaatggacggaaaatctcttcaaaatagtttttggcatttatatgttagtctccgtagttgtactaattaatcttcttatcgcgatgatgtcggatacctatcaacgcattcaggccaaactggtcaagaagaaacggccgtcgctggtgcagatgatgaacctccaccggggccagcagagtccccgctccaaagccggtgccaaatggttgtcgaaagtgaagaaagattccaccgctctgtccgtcatgcacctgtctccccttgggtcgcaagtcagtttcaccactgtcaatacgacccgaatcgagaacgttgccgattgggcggagatttccaaaaagtaccgggaactggtgggcatcgattccgaggacggcagcagctctatgaaggactcggagggtgacaaccgctcgacggccaacgagggcaacaacgagcagaaccagcagcagatgggcaacaacgtgaacgcaaatcaggtctaa

SEQ ID NO: 566 - DNA, 702 bp, Aedes aegypti
atgtggagcacgttttataccactttggctctgatggcaactgtgcacgctgctacgtttaaggtcacatcgcaggtgtacatggatgtatcaatcaacggcaaagaagaaggacgagtcatcatcgggatgttcggggaagaggctccaaagacggttgagaatttcaggcacatttgcatacgcgggatcgatggcatctcgtacaagggcagtcggttccatcgagtgatcaacaagttcatggttcaaggaggtgacatcgtgtccggcgatggacatggttcggtcagcatctacggcaagtacttcgaggacgagaacctgcacatcaaccatagcagttcaggtttcatcgcaatggccaaccgtggtcccaataccaatggttgccagttctacatcaccaccatgccggcgccgtggcttaacggaaagcacaccatcttcggtaaggtattggacggtcaaggggtggtgcacaaggtggaacagcaaaagaccgacaccgatgactatccggtgcccacgattatcatagaggattgcggtgaccatccgatgggcgacccgtttaccgtttccgacgatccgtacgatctttgggcgtggataaaagcagcgtatgttcctctgggcatgagcttctccattctagcattcttccagtacattatcagaaaactggatatctacacgtga

SEQ ID NO: 567 - DNA, 4920 bp, Aedes aegypti
gagttttttcttgagcggaacagaagctttagtccatgaagcttccaaaattccgagcatgtctaatgttcattgatcaacacaccatgcgtacggcacagctctatcatcatgacccatcattgtcatcattggtgtcatgaatgaaaatcattacgcacagaaccgtaacagcaagcaaccaaaacaaaatcaatcaccaaacgtcacacacagtcccgtgaaccaacaggacttcgcttcttcattcaagaacaatcggtcaccgctgtcgggtcgcgtttttgtccatcgttcgttccgaattcgactggctacgtgtggggcgtgtttacaacattcttcaggttttgatgaacgtgtaaatttcctgttccggacggcattgaactatatcgaattctgattgtgcgaaatgatctttagctggtacatgctaagttgaacaatgaagaattcgattccatatgtgtgcagcaaatgtgcgggcgtaaactcattcgaatcgaagcgcagataaggttgtgtaatggtggaatagagtcagtccgtttcttggacacaaagcttgattgttttaattgattcgaacaaagaggagttcagttcttggcgttcgcaatggaggaggaaacgaaattgaatcaagagtcgacgctgccggcagggtccgacgataaacccgccctgcaaacagtcaatgctaaccttatggagactcctagtccagctggtaaactgtacaagtctatagaaaatatggacgactacggcgaatcgaccggcttactggaggagcagcaggtagcttccgtgcggttaccgatcatcggtatgacctgccagtcgtgcgtcaagaacatcgaaggcaacatcggcagtaagctaggcataatcaaaattagtgtaattctggccgaaaatgccggctacatagactacgatcccaccttgacggatccggctcagattgcggccgatatcgacgacatgggcttcgagtgcgtctacaccgacgataggaacggatccaaaagcgatgtgtcgttagctcgaataagtatagaaggcatgacgtgcaattcgtgcgtcaggaacatcgaaggcaacatcaaagacaaacctggtatcgtctcgattaaggtcctactcgatcagaagctgggcctagtggaatacgatccgaaagtgatcagtccggagcaaattgcagaactaattgacgatatgggattcgaggcaaaggtagccggtgaagacaatgtaactcaaaagactgacagcaaacgagagccccgttcggagaagataatttcaattgacgatggattcacgccttcgaatgggaatgccaacggtaagcaggtccagctgaaggatagcttcaaacgatgctttctgcacatacagggtatgacgtgtgccagttgcgtttcggcaattgagaagcactgcaagaagatctacggcgtggaatcgattctgatcgcactactagcagccaaagcagaggtcaagtacgaccacacgttgaccggtccagaggatattgccaaatccataacggacctcggtttcccgacagaagtcattgacgagccaggaacgggggaagccgaggtggaaatcgaaatcctgggcatgacgtgcagttcctgcgttaacaaaatcgaacaaacggtgttgaagatccccggtgtactcaaggcgtccatagcgctgaccttgaagaggggcaaattcacattcaacaacgaaaagactggcgcgagaacgatatgtgaaacaatccagagtttaggcttccaagcgttggtactgtccaacaaggacaaaatggcacacagttacctggagcacaaagaggaaatccgcaagtggaggaatgcttttctcatttctctcgctttcggcggaccttgcatgatcgccatgatctacttcatggtcctcatggaaacgcacagccacgaggatatgtgttgcgttcttccgggactttccatggaaaacctcatcatgtttgtcttgtcaacaccggttcagttcttcggaggatggcacttctacatccaagcttatcgagccgtgaaacacggtgccagcaacatggatgtcctcataacgatggctaccaccgttagctacctctactcaataggagtgctggtcgctgccatggtcatggaaatgaaaacgtctccgctgaccttcttcgacacgccaccgatgttgttcatattcatctcactgggtcggtggctcgagcacatagctaaagggaaaacttccgaagccttgtccaagctgctctcgctcaaagctaccgatgcggtactggtaacgctgggcgatgattactcagtcctctcggagaaggtaatctcggtcgatttagtgcagcgaggtgacatcctcaaagttgtccccggtagtaaggttcccgtcgatggcaaagtgctatgcggcaattcaacgtgcgatgaaagcttgatcaccggggagtctatgccagtgccaaagaagaaaaactctgtcgtcatcggtggttctattaatcagaatgggctactgctggtcacggcaacgcacactggagagaataccacactggctcagatcgtgaagctggtggaggaagcacaaacatccaaagctccgattcaacagctggcggataagatcgcagggtactttgtgccctttgtagtggcggtttcggttgtcacgctgatcggatgggttattagcggctacgtggacatcaatcacattcccatgtcggaggcggccaaggagggattaaatcgggaggaaatcatcttcagctacgcttttcggtgcgctctaagcgtcctggcaatcgcatgtccatgcgcacttgggttggccacgccaaccgccgtgatggtgtccactggggtgggtgctcttcatggcatcctggtgaaaggggcgggaccgctggaaaatgcacacaaggtaaagacggtggtattcgacaagaccggaacgattacgtacggaatgccaatgacatcccggatatgcatgttcgtcaaaccgcatgtatgttcgctggcacgtgctctgagcatcattgggtcggcagaagtgaacagtgagcatccgattgccacggctgttgtaaagttcgtgaaggatgtcctggagatcgactcgttcagtaagtgttcgaacttcatggctgttcccggatgtggcattcgctgtgtgatttccaatatcaacggggttttgagcgatgggatgagatcggagaagatcaaaaattatcaaaattcgtacaaaagtgatgcgacttcggtgagctttgtgaacggcgcggttgtggaggagctgattccatctttgagcccatcccagaagaacaccatggagcttcaacagctgcttcagttggaaaccatagagcctgacactagtgtggaagcgttttcgcgcgtcaatgagtacaacgttctgatagggaaccgggagtggatgaatcgaaacgcggtaatcgttccgccggagatcaacatcaaaatgacggaggaagaacagatgggtaatacggcgattctgtgcgccatcaacaatcaactgatttgtatggtttccgtatcggatatggtcaaaccggaagcgcaccttgccgtttacacgctaaagaagatgggtatcgaagtgattctgctgacgggggacaacaagaacactgccggtaacattgcccgtcaagttggcatcaatcgggtttttgccgaggtgcttccttcgcacaaagtggccaagatccagcggatacaggaaaaccaaatgcgagtggcaatggtaggtgatggtgtgaacgatagtccggctctggcacaggccgatgtaggaatttcgatcgcttccgggacggatgtggctgccgaagcggctgatgttgtattgatgaggaacgacttactggacgtggttgcctgtctggatctatctcgcaaaactgttcgaaagatacatctcaacttcttgtttgccagcatgtacaatctcttgggtatcccactggcggccggcattttcactccgtttggattcattctagagccctggatggcctcggcggcgatggctctcagctccgtatcggtggtctgttcctcgctaatgctcaagctgtacaagaaacccacgaaagcctccctccagacgcccgaatacattgccctggtggaggccggagccctgctagatccggaaaccgtgtcggtacaccgcggcctggacgacattccgcgaccgaactttggccgctcaaccagctccactttagccaagttgttcatgcgctcgccgaaggactccaacgatgatcggctgttggcttcaactcatatgatcgacgacgatgactacagcgtcggtattgtcaagtccgtcaacagtggcatctacaaggacgcgaccgagctgcagaaactgtagatccagtcacttatgtgtttcgtttcgaaaacgtgaccatccgaaattatgttttaacgccttatggaaaagcaggtcgagccaagcatttttcggttggaattcaaccgggaagcagccataatgctaagctcgcagaaatgttcatttctcatctagaataatttcttccatattttttctaatactttaatcagtgattttgtgatatcgttttgcattgttatcgtttgtttcgtccgaactatttttacttagataaactatacatttttaactactcatcaattacgtttgtattgcaacgtacttatcaatcaagcacaaatccagccagttgaaaagtaccatatcctcgttcaggaggacagtttcctatagtgtatgtatagatatgtagccagaagagaagaagagctttatgaataaatgtttgtattgata

SEQ ID NO: 568 - DNA, 1374 bp, Aedes aegypti
attgaaatatttcaatcaaagtgaataccaaagtgcaaatgcggttttctttgttaatagtgtgcctgatagtgcactgctacgcagatgatgcatcgtcgaacagcaacaaaccatcaggttcgcagacgtggattgataagctgaagaatgatttgttcgtcaactatgatcgcaatctacggcctgctgaatactacaatgtcaccaacctggatattgggttgactatctggcatgtggatattgatgaggaaaaatccattctatctctatacggatgggtgaaaatgacttggaacgataacaaactgaagtggaatccgtccgactacggaaatgtcgagcagttccggtacactccggagaacgtgtggaaaccggatgtggttctctacaacaacgcccgaggtgcggacaatctacactacggcaacacgaatgtcatcatatacaactctggtaaagttttgtgggtgcctccgaccgatttccacagtttctgcgagctgaatctccgattctggcctttcgattaccagaggtgctttttgaaaatcggttcgtggacgtacgatgagttacatcttaacatgacgaccaccgaagtgaatccggagatattgtggctggtcccgaaccataagtggagtatccggaaggtcacagttgaacgccatgttaagaagtacgaatgctgcgaggaaccgtacgtcgatatccagtacaacgtcactcttcagcgacattcagcaacccacaaggccattgtcgtgagcccagctttcgttattatgctaatggctctatctgtattttggctgccaccgcaatgtggcgaaaagattgtgctgaatggaataatagcgctgattataacaatattcctcatctactttgctcagcaattgccagcgatgtcgggaaatccgcctctaattgtaaccttctacagcaccacattttacttggttgccatcagtacgattctgtcggtaattgcactgcgtatgactcgcaacaagcactgccgtgcagtaccacgaccactcaagggtcaattggacggatgtctcgggtctgtactaggcgttggcaacaccagccagttggacgacgaaaaggaaaccgtcggtgaagaagtatccgtaaactcgaagcaacgtgactggtgccgactggcaacactactggaccgactggcatttgtggtctatttgatagtatttgttgcttcaatcatttatttcaccttatagtctaagatatgatttgtcttcaagttccagtgtttaaagcaaagcaggtttctgtaacgtcaattattagcacgatgatatgcttttgttaaaaaaaagcttttcgataaactgt

SEQ ID NO: 569 - DNA, 1446 bp, Aedes aegypti
atggatgctatcgagagcagtaaacgatggaatcgacgcacctctttggatgtttggaagcgacggcgatacatggtggtggcgatggcatttctggggtacttcaacgtgtattctctgcgggtgaatctgagtgtggcgatcgtagccatgaccgaattgcgagaagttgtgcatccaaacggaacggttgggtttgaacgcgagttcgattggagttcaagtgttcaaggatatgtgttaagctcattcttctatggctacattttcacgcaagtgctaggaggctacttatccaacaagtttggtggcacgaacgtatttggcgtaggtattggaggtacggcgattttgacccttttgacgccggttttggcacgacagggagctggttggctcattgccgttcgcattctggagggagcatttgaaggtgtaacgtttccctgtggacatgccatgtggtccgtttgggcacctcccagcgagcgatcccgaatttcttcgatagctttcacgggagcatttgccggcacggtggtcgcgatgacacttagtggagttctggcagaatcgtggggttgggagagtgtgttctacttcttcggagtagtggcttgtttgtggtatatggcctggctgttgctagtaaggaagtcacccgagcatgattatcggatgagccagaaggagaaggatttcataatggtgacatccggacgacaagaagaggatgttgaagatgtgaaacatccttggttggcgatgcttacttcgaagcccgtcatagctatgtctattgccagtatcgtcgaagattggggttattacacgcttctgactggattgccaacgttcttaaaaaccgtcctgaacttcgacctgcaagaacccgggttcttatcggccttaccctacctagcgatgggcattcttcttagcgcatctggctacctggcagattggctccaaattcgaggctactttacgactactcaagtgcgaaagtatttcacctgcggtgcgtttttgggacagctcatatgtatgatgattggagccttggtgttgagtccagctccaacgattctttgtgtaacgattgccgttggactgggaggagtcgcctggtgcggttacctactgaaccctttggatctctccccgaaaagctctggagtgttaatgggaatctccaatggattcgcagccatttctggagtcattggtcccatcgcaactggatacataaccaccaacaacaccgaagatgaatggaggacagttttctatatagctgttgggatctacatcgttggaacactggtctactggttctgggcatccggtgaactccaaccttggtcacttgagatgacccaacaaaaaaatcagacgcgaaatgaaacgaattatattagctcaatagaaagtaaacaagtttga

SEQ ID NO: 570 - DNA, 2569 bp, Aedes aegypti
aatgcatcaatctgctgtatttggtcggacttgtagcgaaaatatagataagccagcacaatctaatcacgccacctattaaaaatgtgtgggacgttttgtttataaaacggtcatctcattcaaataaaaaaaatcctatttgtgcgagcttaacttcattaaaacatcattatggcgtttatttctaaaacaccaaaatacagccttactatacttcctcaatataacatttttgcgaaattgcacccacgaccagtgcgatgcgcgccgcacccatacgcctagcgcctcaataatcacggtttggtgactgaaatttcaaaacaacacatgtttgcgccatcaccgccgccgcaccgcgagcaaaatccgaaacaaaattttctttcgacgatgacgacggtagtcattcgtggcctgcttcgcggaacggacgtctaatcgtcggcgcgcctgtttcagcttccactagtagtttagtgtctcagtaggccttctttcggaactagatatcacctcgcctcggagcaacgccatcttcgccgcacacaatctcctcactcattcctaacctgccatcacagccaccatggaccgaagttgtttcccaacgagcaggcccaacttccgaaatcctttcggacaacggccatggatggagcagagtggtgctgcggccgccgctggcggaggcaccggactcaaaggaatcgttgccggtggaatcaccggtggtatcgaaatctgcatcacattccccaccgagtacgtcaaaacgcagcttcagcttgacgagaaaggtgccaccaaacagtataacggaattatggactgcgtgaaaaagactgtcaaaaccaatggcttcttcggtctttatcgaggtctcagcgtgctactctacggatcgataccgaagtcggcagtgaggttcggcgccttcgaaacgttcaaagggtacctgatggaaccgaacggtcagctaagcacctccggtaagctgttggccggtcttggagcaggtgtggcggaagcaatcctagccgtcactcccatggaaactgttaaggtgaagttcatcaatgaccagcgaagtggcaatccccgctacaagggctttgcccacggtgtcggaatgattgtccgacaggaaggcttatccggtgtgtacaagggactcactgcgacgatcatgaaacagggatccaaccaagccatccgattctacgtcatggaatcgctgaaggaactctacaagggaggcgatcaatcgaaaccggtgccaaagatggtggttggtgctttcggtgctgtagctggtgctgcttccgtcttcggtaacacgcccatcgatgtagtcaagactcgcatgcaaggtctggaggcggccaaatacaaaaacaccgtcgactgtgcggtgcagatttggaaaaacgaaggaccgttcgctttctacaagggcacagtaccgcgattaagtcgtgtctgtctggacgtggccattaccttcatgatatacgactcattcatggacctattcaacaagttctggcgttaaacgtaccgtcgtactgtttttcagtcagaggttaagatcttcgacatgacacggaatttgaagaatgaaagatatcaaccaatcgcgcgctggccaatctacgcgctagagcacacctgacaaaccagtatcagggaactgtctgcaaaaatccgttggaagcttttgtagaaagaaataatcaacctcaatgttaatcgtagtcaagctaagcaggaaaacgaatcttaaagaagcaagaatgcatttgtgttagtcgaaacgaacatagctcgttgtagaaggggagggaaatcacacgaacgggtagataataagcactgaaacctgactaaaaaactgttgaatgcacaaacaagtagcgaacacttttccctgtaggtttcaaaacgaaaggcgaccactcgctggattcgattttatacaaaaacaaataatcattatactttgtttgcgggttttatgcactttaaaaattttaagttgtgcaaccacgaagcattccattttttgtgactttaattgtaacgacccaagcttatttccattttacgaagtgcgcctcattgaaatgaaccgttctaacgtttcggttttgtttttgctgtttaaattttaaattctatactcacagttttgaatattgcagattttttacgatattctttgttccaaaaaataactaaagagtaatgcctatttattgcttgatgtgtaatatatgccacagtaacatgtgcaaaactaataaaaaccgatgtaaaacaatgatcgcttttgtttctgttttatgagctgacgaaatatccttggataaaactgaaacgacagtataattgacaaactaaaaaggtgtgaaaatgcaagtataatggcgaaagcattacggcgaacggacgttaggtgatctcgaaaggtggatacatcactacgatgaacacatgaacgatatatacagaagatcacaacagcgttgtgctacgtcattacataatagggtcctaaagccct

SEQ ID NO: 571 - DNA, 1647 bp, Aedes aegypti
atgccgaaatcggaagatgacattgatcttgacggggttctaaatgaaattggtcaatttggacgatttcaaatccgacagtatgggctgatggtgattcccataattctgaatgcgttcttcacgttgagttacgtttttacagcgggaaatttgaactacagatgtgaggtaccaggatgcgataatgggccgaattcggtttaccacccggaatggttgaacaatacagttccattcagacatggaatcccagcacaatgtgaacggtttcagccgataaccaacgcgagcttagataacctcttgtgcgacgctgatgatttcgatcagaagaacatcatcgaatgcggcagctttatcttcgaagatgacgaagtaacaattgtgaacgacttcaacatcacttgccccaacaatgattggaagctaacgctcgtggggactatcaataatgtggggcagtttgtggcgctgccgatcgctggatacatatcagatcgtttcggaagacgtttggtgcttcttctgagcgtggccggcagtgccattttcggtgtaatacgatcgtttgcggcgagttatgaaatgttcatcgccctggagttccttgatcccttgattggttctacgatgtacacaacggctttcgttttggccttggaactggttggccctaaaatgcgagtcaccggcaacaacatcatatcatgtgcattctcgtttgctgaagccgggctagggctgttagctatgctactacgcaactggagatatttgctcagagcactttacatacctggcatcgtatcactaccattcctatggatgactacagaaagtgtacgatggttgctctccaagggtcaacgagaaaaagcattcgatgttcttaaaagggcagcaaaaatgaacggcaaaactctgtcaccggctgcgatagacagcttctgcccggtgagcgataacgaatcaaggtccgagatgctggaaaacaacaacttcttcaatttgctgacgaacgcgttcaagaatcgccgcctgatactccgagtagcaaattgttcattctgctggctaaccaacgtgctcgtctatttcgggctaagtctgaactccgtcactttggcaggcgacaagtatctgaacttcatcttggtttcactggttgagctaccagggtttctgattatgcaattgatcctggaccgagtgggtcgacgagtgacactttgcaccaccatgatactctgtggactgttttgcttcctatcagagtttataccaacagggaatcactggctcagccttattctattcctggtcagcaagatggccataaccatgtcatttggaactctctacatttacacggtggaaatcttcccaaccaaccttcgacaaagccttctctcggtatgctcaatgttcggtcgaatcggttctatggtagcaccacaaacaccccttctggccaaaatctgggccccactaccgatggtcattttcggtagcatcggtattgcatccggtctggcaattctagaatttccggagaccctcaacacccaactaccgaatacggtggaggaagcgatgaacatgaacaccgacgaaggaaacaagggcagggagcgacttgcataa

SEQ ID NO: 572 - DNA, 3646 bp, Aedes aegypti
acataagggattgttacgacacacttcacctcaatatagaaatatgaaattttgcgaaatatatattttttttcataggaaaactaccacgaattccagcacaatcggagagcatcaatacaacctctcttggtaagggggttgcggttctcgcaaactatgaaatattgaatcgctaaaaataaaaccgcgttttggacaacattcattttttcattaattttttaagatgtttttaaaacgtaacaaaaagattcattcagcctgtagatcaagcgccttcaatgtttccaacgtgtgcctaatacagtcctcagatgatgataaggcacatcatcctgcccacgaccggacaacaaaacaagaactccgtttgaaaacaaaaacgcaaatgttatgtctgacgttcagggaaagctcgctctgagtttgacacttttattctgctacaatgtagaagtgggaggtgggcgacgcttgcgccgtttcgtgctatcgattgtcgtcacataagctcgctccggtgtaaagttgaagagagagagctttccgcaggaggaggccaaaggcatctcgaatgtgatgatgaaaagctaagctccatcattcggtatcgaacggtatcaatgaccagtttgttgcagtgacgacggtcgtgagcaatatttttctccatagtttgttatccggttggtgtaacagtgagaaaaatctgctttgcagatttacctgaacgtggattgttcgatttccacttattatccgcgatacggttctttaatactacgaatagtcgatacgcaatcagtgaagtgaaaataaattcgtttcaataacaaacgaagaaaagtccctagaggatagtgcgagtagaatagttaattacgacggtcataggaaaaagatatcgatttgctgatatagtgtgtgcagagccagtgttagaaaatcgaactagcagtgctggggattaccattgagtgatcacatcgaaaggaaataaattccactcgactgagagccttcgagaaagaacctgcaagatgggcgaccacggcccggatatgaacacactggaaactgattatgtcgttttggtttcagtggtgccagcagttttgggattgacagcggccgccatcctggcagtgacagcctgtttctgtgcccgacggattcgacgtcagaaaaagaaggccggtcatgaagtttcctcgctaccattccagccaccgagaccaccaagggccgttcgctctccaagtggacaacccccgcaatatctgaagaaatcgccttctccaacgggtatcaaacccccacctggcggtcatctaccggcacaatctcccactgagcagagttgcattccgacgaacgcaaccgcccccataactacgaccaccaccaaatacagcgaggagaatgagctgacacccaaaaaggttcagctggaaccgaaatcaccagacgtcgaccatttggatggcaacgaaaacgaaaccgaatacggaaagctgggttccattgtctttaagctccggtatttggccgaccgtagcgctctggttgtatccgtagttcgctgccggggattaccgggaaaaaatcatgggtccaccaccaccgatctgaccgccctgccagctggtcccttgtgcaacggaaatggcaatgtcaagcagtcggcaaccgatccatatgtcaagctgcaattactcccggataaacaacacaaggtcaaaaccagggtggttcgtaatacgcgcaatccagtttacgatgaggacttcacattctacggattgaccttagtcgaattggctggaatgtccttgcactttgtcgtgttgagcttcgatcgatacagtcgggatgatgtcattggagaagtagtttgccctctcagcggaatcgacctgcagcaaatcgagaaccaacaggtggccctgagccgggagatacaaccaagaagtttgaagatccgtgctcaaggtcgtggagaactgttgatttcactctgctggcaaccggccgcagcccgattgacggttgttctgctaaaggctcgcaatctccctcggatggatgtaacaggattggccgatccgtacgtcaagatctacttgctgtacaacggacaaaggatcgccaagaagaagacccacgtcaagaagcgaacactgagtccggtgttcaacgagagctttgcgttcgacattccgtcgactgagggcgctggagctacgctggagggagtttccctggaactgatgctgctggattgggatcgggtaacgaagaacgaagtcatcggtcgtcttgagctgggcggaccaagaagcaccgggtcggcactaaaccactggaaggaggtatgcaattcacctcgcaggcagattgcagactggcacaagctgagagagtaaggatggtaaggatggttttagttaaagctgtacaaattcccggtgggggaacacatgatttgatatgatttagttaatctcttgattcctcacttcattccttgggaatggactgatgttgctgcagtactgagttacaaatatcgagttattaaattctgactgttatactactgggcaaaaaactaggcttttatagtttgttaaaaactgataggaaaggtgattacgtggaataatccacagcgaaacctatatctgcgaaaaagaggaaaagttttcagtaccaactaactatataaccaactcttcagaacattgtaatcaccagagagtataaaaaaatgaaatcacagatcaagctataacagacattccatcagaaaatcagataaaagaactgcaagaattccataaaaatcattacataaatggggcggcaactgaagacaaaataaaaaccaatctcaattgatcgaatggatataagatatgtgccagcttagagaattcaatacggctgaagcattatgccctttttgtaggatgggcgaacaatgacagcattaccagcaaccagaaatgaaaaatactgaaacattcgaaaatgcgtagatgtgtgtacaatatagttataaacagtgagaatacagaagagtttgctacataggcacaacagtttacgaactatcgtaaaataaaaacacagatacaaacagcacttgaaaaaaaaacgcgaaacgcagcaccacaaatcaagcttacaagtagaggcaaagatgatatataaatccagcagaaaacaaagtcagattaatgcaaacaagttagaagaccgaatgatttaggatctttgatgacaaatgcgatataattgagtcaggacatttagaaggaatgaacgggatcgtaaagtatgagagagagtgctggacaagaatttgacgaggcgtagatgaatgcttagtgctagacttacttaccattgtcgtttttattaagctattggttgaaaaaagttttcttggaatgtatagtcataaagattcgaattttactttcaaaaacccacgtgaagtcatgtaccatttccaccattggcaaatatgtccttctagattgaggcagggctaatcttctgcagttgattctcggtcggcgcgccataggcgctgcaatgctagtaccgggtaccccgttggtttgaccacatttaa

SEQ ID NO: 573 - DNA, 1420 bp, Aedes aegypti
gccagaaagaagaagaagaagatatttgggtactttcaagttagcgtttgtccgaagattcgatttttggccacttggatatgccacagtgacatattttcgtctgaacggtgtaaatgcaaagcgaagtaaacggataacaccacaccagctttgtttacatttttgacactaaagtgcatcgctcacgggtgtatgtgtgcgtacgaaagtgcaaccgagtgcaacgcatacgttttggtttgacgtcttcgtattgtgatcttcatgatttgctgagagttaagtgcaatttcgttggaggtgtttttccaattttaaagtttatcatccagattttcacggattccataggatccgatagccaccgggaacgatgatcaaggcgatactggtgttcaacaatcatggcaaaccgaggctatccaagttttatcaatattttaatgaagacatgcaacagcagataatcaaggaaacgttccagttggtatccaaacgggatgataatgtgtgcaatttcctcgaaggtggaagcctaatcggaggttcagattacaagctcatctaccgacactacgccacactatattttgtgttctgtgtggattcatccgaaagtgagctcggtattttggacctgatccaggtgttcgtcgaaacgctggacaaatgtttcgaaaacgtgtgcgagctggatctaatcttccacgcggatgccgtccatcacatcctctcggagctggtgatgggaggtatggtcctgcagacgaacatggccgacattctggcccggatcgaggaccagaacaaactgcagaaacaggaagcgggactttcggccgctccggcgcgggccgtcagtgctgtcaagagtatgaatctcccgcaacagataaaggacattaaattacctgatcttccccaagctattaaggatcttaaattctgaccaaacacgaactttgatacgtcgttactcaccaagatagcttccgactcgtcctacattccaatcggcagcagtggcctcgatgggttcaactttgaatcgtaccagtcggagcagcctctggccctggcggcaagcgagaaacaccagcagcagaaatccagacgaaaactgaagaaagctgaaagccatagccataggatgggtggcgatgatggtcaagatcatgaggataaggacgatggctattacctcaagctggcctaaaatcgccgctttccatggttagttaaaacgctgttctaccctttgaacgatttaaaaacaaaaccaacaatgtaacgtttggaatctgctacctacctgttcgaatcttgaactgctgcatatttttaatttggaatcttatgttacggatgtcggaagtactattaatttaattaatggagatacatttttataaggtag

SEQ ID NO: 574 - DNA, 537 bp, Aedes aegypti
atggtcgaatcaattggctgcttcttccaccggcgttgtggaaattccgaaggtgttccttctcatccgattcgaccaacggccgtatccgctggaacccggaaattctggccttcaactcggcgaagtcaggccaagttgtcgctcgagataacaagaatcttccatcgaccagccccagtgatatcatcccaatccaccaaactacccggactatcaatcatatccaatcaacccaattcgaacggaccgcaacgtgaacgaatatcatccatgctacctacagcagtcatccaacgatcatcgtttcaacggcaggcatcgatcgagcaaggcaaaataaaaaaacgaattttcaatttcgttttgaggcgccgggatgttcgatctcataccgacaacggcagaatcatccaagccaagcgcaaattgaaccattcaatttgttgcccattgtttggttcttttgcttcatcgcatcgtcagcccaacgcaacgataggcagcatccagtgcactgctgtgcgcacggtttaa

SEQ ID NO: 575 - DNA, 711 bp, Aedes aegypti
gtgatcaacgaaaatgtgaaaccttcaagcgtggttgttgaatacgctaattaaagtatctaaaatattgttcacaatcgaaagaaataatacagcatcttcaatcgaatacgattcattagatcatacgcaataagctgctctcccgtcgtaaaagatcaaaatcgtaagatggaaaatgtccctacgattgaaaccagcaatgcagcctcgtcaccgacaaccgctgaactgagcatcagcccctcgaaagcggacgataatctcagcatcaaatcttccgactcggtcacaacgagtggcgagtacgaaatcgtccccgaagcaccatcccccttggatacggtggacggttcttgtccgatacttccctcgccgataatgaacattgtcaagacgattcccagctcaaaaacggagtctcgaactcgcaagcctgttgaggaaccgaaacagagcggcgaatcgctgttgaatctgagcgaatgcctagacgacgaggaaggaatgatggttaatctggtggtggccccgaagaagctggatgccatttcgccgatactgaacatcgagggtaacggaaatgtattggatttacagaaaaacatggatgaggtcatactcgagttggacgaggaacgcacactgagtgcaagcgatggtggagagccatgcggtagcggcgcgaacaaggaaatgaaatggagataa

SEQ ID NO: 576 - DNA, 492 bp, Aedes aegypti
atgtcaccatcggtggtgttgttacccctagtgttgctgttgctgccgttaccaccattgttgctgctggttctagtgatggtaatcgcattacgattgtttgctgccaccgccgatgccgaagttacggtctccttccccgccatcgttagtggtatcgaaaataacgccgctggcatcgacaccggatgccgtgccaacgccgccatccataactacttcctcttcgtcttctacgacgatgccttcgccggtttcctcctcgatctccacatccacgccactatcgatgatgcaatcgtaatcgactccctccactatttcgtacacgtcgcctccgttgtcgacgtcatcgtcatcgttctaagtcaaacgattcggctgatccggccgacgttcctctatcgtgtagacggtgttgccgacgcggaacagttccgtgtgggggcgcagcgtcggttcgtgtgtcgctatgatgccggcttcaattga

SEQ ID NO: 577 - DNA, 767 bp, Aedes aegypti
atgcatctcccaatcaagccactgtatagcacctatcagaaagacttatctaactcgctgtgggagccgctgaacactttttgggccaagtgctacgagtcgtgtaaattttcgtctcaacgtcgtgccaagctgcagatggaaagccgtcggaagttccaggagaaaatattgattccatgccgaatacggcagtcggaggaacttgcacgaatcacagtgcagcagacgcagcggaaggcgaaagatgcacacattgaccgtaggtggcagatattgaagcgcttcttatatggaccaaagggcgcgtgggccaaactgtgagtaccttaattttgaattacatttttccgaatggggcaatgtcatctgcaatggcaatcagaagccacgtacatacatcaaatctggtggaactgttttcattgagttcaatgatttcaatgattcaacacgatggtcgttacaaaaaggggcaggcccccctgttagattgtacaaaaataaatagtttgtcacgagttgttagtattttgtatgaagatattttcaggattcatatttacatgcgtcatggtagactgtttgaattattcttggagttcatcttcaaatcagactccttcccaatatcttcctataaatcattcagaaatttcggtgctgccttggttgatgaataaaatttcgttacggatattgatctataaaattattattcaagatatttaaaaaaatcaaaccagagacaaatagagacatagcac

SEQ ID NO: 578 - DNA, 1707 bp, Aedes aegypti
atggataaacggcaggatggcctattgttcaaatcttgcaaactgtgacatgatttccatataaaatgtccccagattaaggaactggactcattgcagacggtgcactcgattcggtaacatttgaaggaacgatttcaacggtttgtggcggtttaacgagttttgtgaatatgttcagcaaaaacgtagtcgtgtttgtagtgtttgccctggccgggttcgaatgtgcttatgctcaaagcaacaactggcgccgaccgaacgagaccaactactcggaagcgtcgtccgccacgaacgatcgcacgcagcggctcggcctgaccaccggctacggaggcggactcaacgggtacggatactccagctcgggcgtcggaggttacgccccgctcaagatcgacttgggcggagtggtgctgggaacactggtcggcatcggcgccctgctgatcctgcccaagctggtgacggccttcggcggcggctacggaggacactaccgtagcgagaacggtgacggcgacttcacccagctgctgaacaaggtcgacgacatgctggcccagaacaacatcgattcgggatcgtgcctgcagaaggccatctgcacgtacgtgcagaagtccgactaccacatgcaggtcggaaccgccgatcagatcgagcacatgatcctcgcgctggcagagaactccctggtcgactacatgctggacggaaccgccatcaaggaagcgatcaagaacggaaaagctcagagccgatcgtgcgatgaactctacaaatcctgcccgcttgataggcaatccgcctaccagatggccagtaaaatcttccgcgtcggaggaaactgaatgattctttgaataacaatactctccgctttagtgacgctggaacattctcactcttgacttgatatgaacccgtgccgtactttacaaactctcgaagaccgaatcaccagcctactacgtttcgcttgcttaaaaactcaccgtaggtgacaggtgcgtttagtaaatcacgagcagtgactcatgccaacctccactttatctggagtgcaatataaaattcgcacgcttagaatagatgaacccaaacgtttttcgcgacggtggcagatattcaacctgattccaataatgatgacccgatgtcgtcgtcgtcgtcgtaaacgagtggttctatttcaggaaaattccacacaactcaccgcgcatttcacttcatcgcaccttcgacgccatcatccaggttcgaggttaaatgtttagtgtgtagttaagtgtattacgatcctaccacacgaaatggtctaccgctgtgagagaaggccgtaaatcaacacacctagcagcacataaggagcaactgtttacaacagtgaaattttaatttttcgggaatgcgagcaatactgacacaaacacgtttggaaaggaatgcactctgcgctgctgtgaacttttttgtatttacacaaccattctttctgctttgtaattaatccttccgtgcttcatgaaactgctttctatcgcttgcaaaacataaattttgaaaataaaaaccaaaaaaaaaatgaaggggaaccaattttagtcatgtaagaaacaaacgatgagacaaacgactgtaaatacatattccattttttttttgcaatgaacaaataaataattccaattaaaccaa

SEQ ID NO: 579 - DNA, 3242 bp, Aedes aegypti
atacttatgacagacatgtgataccaaaaccactgtacaccgtgatatcatatgtctgtcacccagtatcaaggtggtatcacgcaagcatcttagtaccgtatcatggtctgcgggcgttgtactgtaccaacgtacagcaaatggaagtgccatcagcgctttttccagccagtagcgaaaccgtgaactaaaattttccattcgtttgacgtttgtgaaaagtaaacataaacaaaaatccaaaacaatctagcactagcgagatcgtaaattacgattacgattaaattcagtttaattgtttgaaatcagtttaattagctttagtgccgaagaacatgagctcccagaaggtgacgaaaaagatcgagaagattagtgagaaaaagccattaaaagtgctaagttccgatgaaatcaacagagtcatcgatgtgtggagtgaaaatgtggacgccttgcgcaaaacttgcaagaactcacatatttacttaaaaatgtgtgagcaactacggagctatggcatccgtttgactccaaccgaattgcgcaaccgaatccacaatttgtccaaaagatacagggccgagaaaaacaaaatgggagtgtccggaggaacacggtcaacctggacctattttgaggccctcaattgttttttgaaaagcttcaagcaaaacaatatgaccgaattaatggacgagagctttgttgccgactcgaaagcagcatccaaacatccggaagccatagaagaaccggaatgtatggaatttgcggaaagcatgagagatgatccggaaggcatgaaagatccggagaatccggcagaaagcatggatctgcaagagaaggaagatttcgaaggtgaactcttggatgatgattccgaatattgtgtgctgtacacacaggtgtccgagccagaatctccccggtcacctttgtcaacaatttcgcaggattttctcaacaacgatgaaccagccacgtcatcagcgggaccgtcaaaatctccatcaacattcggtgaaccatcagctactccatcaacttcgaagacacgagccaaatttgctccacctaaacgcggaaaaaagaacattcaagaacgattgttggatttggcggagaaggagaatgagaaatttgaaaccttcatgtcagaaagcttggcatatgatcagcaaataattgagcagatgagacagaataatgaactactcaagaaagttatcgaaaagatgtaatttcaggtttaaagacaggtgttcgaaagaaaataggtcggaaggacaaaaggtcgaaacttaaatgcctcattaaaattcttcctcatttcttaatatgctttcatccttttgtacctcttttttttgctttttgaccttttgtcctcttgacgatttatatttctgccgtttgttgttttggcctttcgtgtaatattcgttattcgattttggttaattcaatcattcacattatttttaagtatactataatgataaaatcattatatttcaatatgtattcaaactaaatcgttcgctgaataagttgttgaattgttgtttgatttgaatgatttgactatttcattttaatctgtctcaacattgtcaaatagataagaaagagaaaaaatcaactttatgtgtgttgtttttttaataaaagcaagataaataaacaagtgatataatttgatatcaacgaaactatttagaacttattgtaaaagtactctagaagtaagaataaaccagacttacccaaatgttccattagcacacgacgaactgttgtccccgaagaactgtcatttttgactgacaatcctcgctgtggttgcggcttggaaggattcattttcagttcagcaatccatgacttgttaatcttatcatttcgatcgttgcacaggttatgcaggatgcagcatgcctttatgatccgattaacattgttaacatctacttcgagcccacgcccaatctttcggaagcgtgctttaagatgaccgaagacgttttctacgactctccggcatcgtgaaaggatgtagttgaataaacgttcaggttcactttgattcagagcaaatggaaatggtttcataagagtaggagagagtttgaacgccgaatctccaataagaagaataggaacattcactccattaatcatttttgaatactgttgaaaaagtggatgagaatcgtgcaaagatttcaacgatgaattctcaaaaatggttgaatcattggatcgaccgggcactcctacatttatgtatgtgaagcggtatctgtagtcaacggctgcaaataataccaccgaatgccaacctttgaagttgtagtaatcaacagcttccgcttttggcacgttgacctcaatgtgacaaccatctaccgctccatagcactgtgggaacccaagctttaaaaacccgcttgtgatttcattaatcttttcaggtgttggtggatatgacgtaaatgcttcgtcgtggaaggtgtggatgattgcatcacaaacttccagaacaatctctcctacagtagtccggcctaccccaaacaaacttgccactgttctgtattccgcagacgatcccagggcatacaaagcaatggcaatacgtttttctagcggtattgcaaatcgccaatacgtatcctctttcctgaggtagaacaatttggacgccacatagtcaaaggttttgcggtcaatccggaaagtgttcttgaacttagcatccgtatatttgggtacttccacctcccaatatgatgatttctcaacctggaacatcaataaattgccaatcatcgcaaattcattcatatttcaacaataaaaaacacttaccattgaccaaattctacgtgtttttgttggtgctccacaggctgccatttgagcatagaaatttgattttcttttgaagcgcatagccattattttacttttattccgcttttttagcaacatttgtaatttaagattattttcctgaatgatattcagtatcttgatatttcttagtaacattttgaaaaataatctgacttgtttatctcaaataacagaactacagtttgtttaggtcagagctgtcaaacgcaatacaatgtacgagagcaaaatacgtgtgtcaccctcccactgtacgcgtacagcatggtatgaaaatcattgtactggtatcacatgtctgtcagtggtat

SEQ ID NO: 580 - DNA, 2352 bp, Aedes aegypti
atggcaaaagagtgcacgtgtgcagtttatagcccgaattcaatcgatggtaatacgtgcaagaagtgtaatgctggacccgttgctcgaacccagcgagcacagaagaagtgcaattcttccaagtataaagacgcgtcaacttcaccaaaatccaacagtccattgcgtacgctagagccgagaagtccacgtagtcctaaaagtccgaaaagccccagagcggaagcttcgacggatacaaagtttgatttccccggttcccctagaactgaaagtcattataagcgtctatcaacgttgagcattaacaatggtggtaataaaaatatggccaccagtcccatgaaacagcccactccaaagatgagtcctaacaaattgactccggtgaaaagcgacagaatcctggagaaatcgaactcacttggggatagcaaaccgcaaaagatgctgcgaaccactcgaagtttatcaccgcggccaccagtcaagcatcaacattcaataatggtttctgatgaaaatgacattatttcggtgaagctttcaccaaatgaggaattcgatgaaagtagggaaaaatgtaaggagggaaattgcgaagaagctgtaccaatccataaaaaagcgtatagcgaaacaacatctccaaatttgtcagactgtggtagtttacagctagacgatagtaatgttaaaaatcccaacaaccgaagcaccagctgtttgatatatgtgccatcggacccatggactcgtatgtcatcaaggaactcaccagctcctgccagcaagaaagagctcaaggcgaggaagctggaaagtaagtctttcagtaagccgaatttagaatatttagaggactctgacccgtgggtctggcgttccaatattacattggatgaacgaagcataaagaaaaaggggtcgctaccccaccagaccaaatcacttagcagtgctctcagtcgtgacgaactggattcgcggcagtcacgcctatgccagcaacggtccctgaccaaatttgataagactttaaccattccgggaattgatttgcattttgatgctcgcaagaaaattaccagaccaaagttgcagcgctccaaatctccggcattttacgaggaattcttccaaacggaaaaggaaaggccgctcaacaaaaacaaatctatatcctcgttgaagatcgaaaagaacgccagtaactcgaacatcaacggtgccaaatgtacttgctacgaggcaacctccctcaatcgccagcaatccaacaacagcaatcaccataactgtgaccaccaatccgggatccataaatccacaactagcattacctctcccaccagtaaaaagcaaccctcaccgaagctaagttttcctcaatctcccaagccaaagcaaaatcagaagaagcagcatcagcaacaaacgcaaccggaactggtgaaggcctcgcttaccgtactgaatccgaatctactgcagccgcggcacagtttctccaccccatcgcaaaaggacgatgaactgcagctgaacatccggcggttgagcgaacagatgaacaagtacagctcgggcagctactttggtcagactacgcccagcttcatgaccgatacgattccgttggacaaaaagaaagccggtggcagtggagggttaacgtctagtggcccgaatgtcaatggcggttccgccggcgttagcaccgggtcaggtgtcgaatcgaagaaacgggcctcttcgcactcgaagatcaacgatccgatactggagacgcgctgctaaggtgcggggttggtcttgcaattcgcggtttcgtttcctgcgaagagatttcgttgcggaagattcggaagcgacatactcgtggtaagttagctagtcaaaattgtacaaagaaggcgatctacttaggtaacacggaaaagatgttttttcccttcgatatcatgtttgcattgtgtgttagtaagatagttatcatcagctcgtttatcatcactcactgtagtaaagaaatacaattgttgaactaatgtggatagtgcgacgccaatgaatgtagatggttgacaattgatggcgggtagaagaaagagagagagagttgaatgtaactaataatcaaaagcctatggaatgaagcttctgtggtgcgatgtgattgtacaattttaaaattatgatgatatgtgcatgcgaaggtggtgccaaccgggaaagataggtagatgaagaaatgttttaatttgccaaaataattttgtatagttcttgatgtaagttacataaacatgtaaatgacgaatatgtaccaatatagtgtatgaaatg

SEQ ID NO: 581 - DNA, 3698 bp, Aedes aegypti
gtgcagtcggtacggttggaaaaaaaattgtcgaattttagtgagcatttttccgcttgttttgttaggaaaatggatgattacaagcaaatagtgagtaaacatagcattttagcaactgctagtgcaattcaaaagtgcatcaaatcgatcaacgacaagcaatcgaaatctaacgtgaaaaccaatgagctggagctgttgaaaagcttggtgaaatcggataatccaagaacggcgcaattggcggttcaggccctggtgcaactggtgtccagtggatcgctggatctcggtcagacgttgggaattttggttacgacgttagccaattcatcatcggcccatttcaatgcaatcgggtatggtatgtttgagctgctgttgctggatcttaggcgccgctgttctgccctgggggaagatccttatgtgtgccagttcgatctgaagccaccgcaacatcctctgatattactgctgagcaaccgggatgtggtgaaggtactggctttcagcaacaaggttaacgaaatttgtcatcaccacgaccagatcatacgtaaaaacagcgtggagttcttgaggcccgtctttctacatgtattcaacaatcctacactattcccggaaacccaaaaaatgtggcgtgccttgctgaaaagtgcctcgaatgatgacacagccgtgaagatgatttacgagattatatcctggagtaaaacatcgaccagcgaaaaatgtctttatacaaacaacttgctgctcgaagtactggattatgtcccggccgagaagcgattcgaatggctgcgaagggacatctgcttgtacatcgctgccgtcagtaaggaactgatcggatacaactatgacccatcggaaaactttttaaagattttctctgccctccatgtcgacaaagatcatgcatcggttaactacaatagtgtcctgctgatggtattgtcagacgtaatgcaaaacattgccccggctcatattcttggattgatgagaatcgtacatttcctgttagaatctggatgcaatcgtttgagccaacttatgatcatggatggagcagttcaatttcttggacagcagacattcattcataattaccttgaggattgcaactgtgttctcaacgctgtcctggacaactcatacccagcagaagttcccaccttgttcgagatgcgtccggctagctatttccattcggacattgcaaaatacagccatttctgtatgtggtggaacgatgtggaaaaccggattttaactatagatcagttccttgaggcactatcccgtacatccaggttcagcgacaaagtaaacctggttctcagagggctcatgtatacgcacgagatcccattcgaagattggagaaaacttttcgatcaactcgttatctgctctaaatcaaacgaagaaatctgctccaggctgctaacaccaattctcttcttactggccaacgatagcaatcctcgtaaacggcttcatctgctaagaagtctggcctcgatgggtgccaaagaccacgtgctgcgagtgctgaaagcattgaccaaagatgtggaccgggccaccagtttggatttgtaccttcggctgtggaaagctgaacctcggacttatccatttttgtacgacgtgctcaaggataccagtcgcaggccaagggaggattcctgggagacatcattcgcccgaacgtacacgattcgagaaatttgcttgatcaaaccacaacagcacggagcagatctggtaaatttgttctccgaaatccttagccacccagaggatgctaacaatgaagctgctgtagcgttggccatcgatgctattgccagcctttgtgagaatcacgtaattaacattgtgtccacctggaaagtgctcggttttaagttcactcacgagaaacgcccacgaatcattcaaagcctgtgcagatttttcgccaacgtgccttccatcaaagttaactcacttgagcaagaacgactggtcaatgaaatcattctcaagctgtggcagtttgtaacggatttcgatgaccgtgaagtgattgtcgcggccctggattcgttgaaatcattttctcctgatatgatgaacatatttcaaatacctgaattttttcggcaaggaattcctcttccaagtgaggatgacgaatctttagatgctaagatgatcccaggcgattgttggattcaattaattcactttgttaatcattccgctattgaagcagctggagatttggtttcgcatcatatacataatgaaatgcagtcataccgcggagggatctatctcaatccagaagggcgaccagaaccatcgtctttgaaacatttgcccaagagaagtatccttgctgcggtaatacatcacttaattagccatggtggcaaaatgaattccgcagataccaccgatatagttctctataacctcttgagaattgtggccaaaaagtatcccaagcccattccacctctgaattggtgcttcttgcatgaatattttcaccattgctacgaaagtaagaaatactgtctccagatagctatcaagcaaatgccacactcaggaactgccaagcggattgtggaaaacttcctcagtgacgccgtgcaaaccgacatggaggtcgaagatgtgctggtcgttctggaatatctggatgtgctgacagaatacgtgcaaagcgatatctacaaaagatttctgcatatgtcgttacaatttttgcttgaaaaatctgaggaacacggagccaataccggaagcccattcgttgaaactgtgcagcatttgaaaaatgctgttactaaaaaatcctatcagaatgaggacaacttcgattatctatgtgaagctttggaaaatttgtttagtcgttttagcatcaacaccaagctatttgacgaatacctcaaggtcttgagtgtgctgccttccaaacatttgacgtcacttttgaaaccaagcacgtggatcgacaaacgtaatcaaaccaagctagaaaaggcaatcgttttacagttttccattcataagcacaatccaattgccactgatctacatctcttcggattgagtgacattctgaaaaccatcggctcgtttgagacaaacatgcaaaactattttttgcgttctttcttcgactttgtgcctcagctagaaaaccacaaagctctgaacggatggataattgagcttatcggctatatccagtcggatctagcggaagtgaatacacttcaaatgaaggaggttgcccttttgttggatgtgttcctcacagctgtgatcagtttgtcaggctacggagcgctgttcggcaaagccattgtggaagacttagacaagcgacttttcgtatttccgtcgagcctcatcatggtgtttcaaatgaatatgtggagggaaattgaaaataagatttatgaatttctctatcatctatacaaccaccccaacatttcgacaccttatgcggaatgcttaaagaatgctctactatgctgcaaggagcaatcatatctgcagcaaccgaaagcgtggccgaaattcgtttcattacgaagactgtaagtacatacatttttagttaaattttgtttctttacgtagttcatgcaaacaagactgttgcactacgg

SEQ ID NO: 582 - DNA, 978 bp, Aedes aegypti
atgcagattggatggattgggaacggatgcgagatgggttctgcagtttcaattactcgttcagcttcgtctgaagtagataaggtctacacttccgttcacatcaccaacctagatgttccgcgaacttacatccttgagcgggaggagtttctcaatgctttctctgtaggacatcggcatccgttggttcatattgaatccgaatcggatgatgatgatagcagtagcagtagcagcagtacagcgacacccaccattgcctatacaaactacactgccacgagtaacatcagtagtaatagtaatgaaggaaaaagttttcacgagatcaaaccactgataatggactgccagtacgagatcaaggctaacgagtgcggttttgtgctgaaatggtactttaataggaagttaatttaccaatggataccggcgcggaatcccgtcggaatgaaccaattcaaaagtgaattgaggaccaattactcgatgtcggacctggctaactacaagtaccgagccctggtgatacagaacccgaagctgaaccatagtggagagtacatgtgctcggtgcaaacgtatgaatcgttcgaccggaaggcagcccgattccaaatcgttgtgccggagaagaggcttctacttcactacgaaaacgatgctgaaaaagagaacatgctgttgataaagtgcagtgtttttatgatctatcctgaaccgaatctggtactagtggtgagcggtgatttgctcctggttagctcacggactgtggtcgtctcggatcgacatcgcatgtacaacaaaaccatttacggtttgatcgacaaacatttgctcatatcgcccacctcaatagggtgcgtcctcacggtttccggatccagctatgtacgaaagcgcgaaacaatttattacggtaagcttatacgaacagcaatctctcctcatctacaacactatacctattga

SEQ ID NO: 583 - DNA, 2106 bp, Aedes aegypti
atggtgggctatttgaatttgatcgctgtatcgtcatcacctccagatagcaccttaggggaagcgaagtcaccggagaagacaggcggtggaacaacgtcagggatctccgccagatcgatcgacaagtttgaagccaatgagctacctgagggtgatagcaagatcattaaattagcgataaagcagattgagcctcaggtcacatccggctccagaggtgccaggaacctgggcttctcggctgatgcctcgttgaatgcaattcctggaggtttgaataacgagttgacaaatggggacttcaaagttcctgttaccccagcatcgaccgtagctaaagatagctatggtaatcccgttactccttatgcagatctaggctcgacaggactggactccgccggattcatcccagatatcaatagggacacactacagggattcagcaacaacaacaaccaatacagtcatttgaacttcaaattacctagttatgcttctggcattattgaacctgtactgcttccgccgatcgcgtccggaaattttcaaccaccgcaaggccaatcgcaatttcccttccaccaaacaacaacaaaagctcctacaactgcattccagtttgtatctaacgccaaaatcccttctgtagatgatggtcagattcttttcgctcaaaaaccgttaaatggactgatccccccacttttcccgggagaacaactgccggtgtataaagtcgaagtcggaaccgaacgttcgcccatatttgtgaaggacccattttcatcgccttcattagataaagggcttactctgccttatgacaaaccacctgttaacttcaatcaaggctcaccgcaaaactcccaagttccacttcaggtacctctatccttagaacctttaccaccgcaacaagcccacactcctcaatatcatcaaactcctcaacaacctcagttccatccttcgactcaatcccatcaacctcctcagcagccgcagttcaaaccaacacaagctcctgttcaaaagtatactggatcattcggtggcgcacctggacttctcggaaatcagcaaaacctcggaactgcttatacctcaactccaaaaccagcacaaccccaagctccacagacctatccaactcctcctcctactcatttcatccctactgtatctcagacagccactccaaccaaagcccctaacaaatttactggcagttttggaggtgcaccagggttccttggtaatcaacaaaacctcggtacggcttacacttccactcctaaacccactcaacaaggcgtccctcaagctccttcatcccaatcaacaaccaatttctctccagttatccaccactccaatcccactcaagcccccaacaagttcaccggtagctttggtggagcccctggcttccttggtaaccagcagaatcttggcactgcctacaaacccacaactcccatcccgacaactcaacagagacccatgtcgttccatcccccaccaccacctcctccgtcctcagcaccactgtacccacaaactcaagtacccagcatcatccgccctccaagtcccttccaacctcctccacagcagcaacagcaccgacccggtcaatacgtcgggaacaaattcagcggaagtttcggaggtgccccagggttactgggtaaccagcagaaaccgggaactcacgtgaaacccgatggctctattctgcctccgtccggaccgggtattacgggaccaagctcaacggctgctgttggttcgactgttcataggcctgcggcacctagcagcggcagtacatttaccggaagcttcggaggtccaccgggtgttctgcgtccgttcgataatgttaaaggataggatgggaggcgaagccaagaggggacaaaatgaggttaccgagaaagtattcgaatacgcaacagtgagcagtagttagatcatatgcatacgaatgtattttaagtttaggattaagtaaatttctaagaatatatcagaataattatgcatttagaatggatacgatttatggaatgcaataaattatgttcaaaactgata

SEQ ID NO: 584 - DNA, 1348 bp, Aedes aegypti
agtatcgctcaaaccaaccagttgcgtgatttgttttgcttctttagatcgctctctcctgagccaaccagacaacaacgtctatctacgtatttttttgttgtgttcttttgtagcttctgaggttctaagagcgtgtctatcgtccagtcagtattccttgtttaattggctagtatggtgattcaaagttcatacgttcggcggctacaactgatcgccagtggcatcgcactaagacactcatcgccccttgttgcacaaagctggagaaactacttgggacttggatcgcgacaaccagaactacaaaggtgcaatcacgtcatctctagactgcaggcactagtgcaacgcaccactaaaattagaagccccatcgaagcaaaatcgtccggtaccgcaaaatcgactactgctaccgtaggagttggctttcttgcgtcgttttcgttgttttcgtccggtaaagcgaagaaagattccaccaccgagaaggaagccggtgagaaaatggccgaaatggaagcaaccaagagcctgagcgagaccattcaacactcggatcagctgttcgacgagaacaacttccaggaggcttacgacttgctaatgaaaagttcgaatcctgaagcgtacgaaatcaaatggcgcattgctcgtgcacttttcaacctctcgaaaagcactcccagccccaagaaggaggaaatggtccgcgaaagcttccagttcgcgacggaagccctagcgctgaatgacaacgacttcgccgcgcacaagtggtactcgatcctgttggatgccaagagtgggctggacggtatcaaggaacgcgtcacacagttggagaacgtcaagaagcacatgaagcgtgcgctggagttgaaccccacggacgcaacaagctggtacatcctgggtcaattttactacggattggccgacctgccgtggtatcagaggaaaattgtggccacaatttttgccaccccaccagagggaagttatgaagaggccctggagtgcttcgaaaaggcagagcaaaccaagccaaatttctactcgatgaatcatctgatgttgggcagaacgtatcaagctctcaagaacaacggaaaagcgaaagagtttctcacgctggctgcaaacgtgacggtattgaacgaagacgataagcaagcaaaggaggaggcggcaaaattgttgaagaaattgtagaagaaagggtgggactggatcatggatggagggtttttgcaagtcatgacaccatgtaatattttgtattttttgttatcgatattattatgtgaaaaaagtaataaatagatttctggtatgatcg

SEQ ID NO: 585 - DNA, 183 bp, Aedes aegypti
atgccaccaacttgtatccgttgtacgttcctcccaagacgaacctacatctggatggcaaaccggccttggcatcgtataccgctgggcaacgcccacctacacaaaaatctcaataatccacacgcaacgaagtttatttttttcacatgttcatacacgttttgtgttgtgtttacgtaa

SEQ ID NO: 586 - DNA, 441 bp, Aedes aegypti
agtctactgggcgtgtgcgcagctgcacgcgaagaactgccgagcgaggatcaccacccggaccgacagcacgaagataacgtacaacctccggccgcatactcatccgccggaactatagcgcccaatttccgaatctcggtcaaagaggagttccgcatacagccaccggatgacgaactcctcgagccaataacgggcgtacagtatccgctggacgtgagaactgtactggacaaccgaggacggcccgttctgctcgtggatgggcacgccttctcccggaacaacatcggcaagacgcaaacctattggctttgttcgaagaaccgggcgctgaaatgctgcgcccgggtgaccacccggagcgacagtgccggagtgattttcacgaatccgtatcataatcatcccccgcttcgctatcggagtgggtcgtaa

SEQ ID NO: 587 - DNA, 1294 bp, Aedes aegypti
aatgtccttttagtagaggctcagtgcacagcttaaacgatgaccgactccgatgggataccaccgccgcagccggagaatcccttctccggaatgcacatcgacgatacggccttcttgaaggaagtcgaaggtcgcagctcgtgtaccgtttgtgggaagtcgaggaagttcttctgctaccattgctatgttccggtggctgaattgcgggacaagctgcggttcgttcagctgccgatcaaagtcgacatcatcaagcacaggaacgaaatcgaaggcaaaagcacggccatccatgcggcgatccttgcccccgaggacgtcaaaatctacacctacccggacattccggattaccgggatgaagaaggggtggttctgatattccccacgccggatgccctaaccgtggccagtttatgcagtggggagctcccgaagataaaggacaactatggacttccgaaggggcatcacatcgggacgttgcttcgctgtcggctcacggacatagtttcggaagaagcgccctccagggcggacgaaacgaagaagcaacagcttgcacaaagattgccggtcaagaaggcggtattcatcgacagcacctggagtcagtgccggggaatctacaaagacgggagggttgcctgcctgcggacggtggtcatccagaaccggatctcacagttctggcgacaccagaagaacagtccccggtggttcctggccaccgtggaagccgttcatcagttcctgatagaactgcacataaacgccttcgggttggactcgcgataccaagggctgaagcatttggggtatctaaacttcccccatgacaagctggtgcaatgggaggatggcctggaaaatggccaagcctccccatataacggtcagtatgataatttgcttttcttcttcctacacatgtacaacttgatacatgattattacgagcatcatactctgcgcgcctaccggaggccactgttcctggaggataagtatcagcagcaacagctgaagaagcagcaggaacaaaccgctgaaagcctaacgacgtaaatctggatgtgatttttgattaataaagttgaatgtcgatatctctttaagtttccattagtgtttaattcttatccaaaacgtacggtcttataaactatttctttttcttcttcgcggactcggtttccgttccggcggcagtcggttgcggttctgggcggggcttctgccagttcaatggcttgcggcgataaatcggccatggtggaatggtaag

SEQ ID NO: 588 - DNA, 1750 bp, Aedes aegypti
cgtcagtcgtccatcgccagccagagtcgaagtggattttgtttggatcggatcgttgttatgtttccagttttccggtgaaaattcgtgcaaaaattgtgaaaatcgttccgcgaaataatgtgaagtgcggttccggtggtgaggtagctaaatctatccgataattgagtcggcgtagcttcgaacgaacgctccagcgctttttgtcggcgtgcatttcgattttcctcttgcagctgctgctgtttttggtttactgcttcggttcagctgctaggaagatgtccaccgaagaaaatgtgaaatcgttgagggaaataaccggattgaagccggaacaggcagccaatctgttgacggcttacaatggtaatctggagggcgctatcaatgccttttttgagaatccggaaggagttttgaatccagaaccaccggttgtaatcaacgatgatgaagaagaggaagtacgggcaccgattccgagaaagactgaagttttgctaccggccgaagatacaaccagagggcgattgaaacggcgaggggccacaatcaccgaagtaccatttagaaactttgagctcgaagggaagctacaagaacagatgctaatgcaagggcagggtccctcctcgaagaaaattacccgattggaggctctgttcatgccgccgttcgaaatacttttttcaggcagttttgatatggctcagaggcatggaaaaagcgttgacaaatggattctggtcaatttgcaagacgatctgaacttcagctgtcaaacgttgaacagggatctatggtctgattcgcgattaaaagatttccttagaaacaatctaattttctggcagacgtccaacaagacgacagatggagccaagtttaaaacattctacaaagtcagcagcgaaccatatattgggatgattgatcctcgaaccggtgaagaagtgcgaacattttcagttagcgacgtaaatccggttaaattcctatcttcgctgaagtcctttctcacagaaaataaatctccccatggaaaggaggtgaaattcgtagaatccagttttatgcgtccatcgacttcgcaggcttcttcaagtggcgcaaatggttccaaagcccccagctccagtaaagccatttggattccggatgaggacgaggaagagttccaggagattactgatagcagcgatagcgacttggaaccggatactcctacatcaaaatctccctcgaagcaggcgacaatccccacagaaacgcctagctctccgatcctcagctcagatgacgagacaaaccttccgccggcggaaaaaactcgtatcatgctcaaaatgccgggcgacgtcaccgagcggttgttcttccgcagttcccgaaccttggatcacacgaaagcgaagctaatgaacaaattcaccagcaagtttgccgaccagaaagggaaatcggttcggttcttctgcccggcggtcaaaacagatcttgcgtcgctcgacggaagtcaaacgctgctcgacttgaagatccacccgaatgcggtcatacacgtgacggtagatgactgaatatgttacgcgttccggtatggtgttgatcttattaattctaatatgttttatctcgtaagaccagtcgtcgccgcagtcttttccgctgatgcatgaagggcaatgactaggattgaattttagtttctgagaagccaataaattactcaaacgtatgtgga

SEQ ID NO: 589 - DNA, 567 bp, Aedes aegypti
atggcttttgagttcattctattcgcaagtctgttagttgctgtgagagcaggattttctcatcaaacaattagtcagcgcgtgccatcttcctactactctgggagaccctatgccgtagaagaatccgggaaaccaatatacataggcaatgatgaaatcatcaagcaccaacatgaagcccaccgactggatatgacccgtggtcaataccgtttagttgatccggatggcaaacttcgacttatcaactatcacggagctcaacgtgcccgctcaaataataatattcatcatagggctgttgaaccccgtcagtattacaaaagaccagtccaagcttcaaatcttcacacagtgccggtcgaaacccctgtcatcttacgtcgccaggcttcagcaccgataggagctcgtattttaaaatctcactccattccaaaatctagtagatcccaaagtgatattcccgtgtcttacgtcagcatttcgcaggtgctacccactggaaactatggtcagaaggagcttcgcacgaccagccatgccagtcaacatccgtactaa

SEQ ID NO: 590 - DNA, 925 bp, Aedes aegypti
caacaacaaaacatctgcggcatttaaattacagtttctgatgctggaaacaaaaggataaaattacaaaagattttattgaaactaaacaaaaagtttaagcaatcctcacggtcaagaagttcaatcgcagatagcctttgtcggataagtaatctggagttaacaaattaaggatggcgacaaaacgagccttcaacattctcgagcaacggaacgtcaacgaaaatgcccacattggcaaaacgccattgccgggcaaaaatgtctcccgagccccgttcaaaagcgccctcaaggatttgaccaacagcagcgcggcgtcgcggtcaaatttaaccggaaaaccgtccgagggaggagcagcttcgctcaaaaagccttcccagcagcagaagtcctttgcttcgacgatttcgcgaaagaaatcgtccgaaagtaacattcccgcccaatcgattggctccaaaaagcaaaatgtcacggcgccgttgtttcccattttcagtccactggatgcggaatacagctggggcaaagaagcttgcctccgggaggatttgctggagcagatgatcgagtacaatggtcccacttaccggcgggagattaagcccatgaaggcgcttaaaattgagccactggaactgccggaacttgaaatgccgcgtccggaggtggcaaagcgtaacagagcaaccgtaaaagagaccttcccgtccagttttctcttcggtctgcaggaggtggacattccggatttggaatttctgttctagtcaccgaagggtggtgacgcaggtatatttttgattctattttagacgaataagctttctgtataatatttaaatctcaatttctatttgtattagttgttctatgataattgtccaatacaaaatgactgaccataaaaggacga

SEQ ID NO: 591 - DNA, 2047 bp, Aedes aegypti
atgggttgtgcgagcagttcaccgctaatcaacggtggtggccccggtggcatcgtggaaacggcaaaggaaacagccagcaagactgcgaacgaggttctgcatgccggagaaactgcaattctcgatgttggagagcacatgaaagatgcagtgaaaaacgtggccagcgaaatcgaaggagtactaggaggaaagacggcaaacaaagacaagagcgaccacgtaaacgaaagcgatcttccccaactgaacggtcacgacaaggacggctcggactatcaaatcattcctttgaaagacccgaaacaacccggcgtcgatgagagcttagagaacatgaaaaataatcttctgaaaaaggcacaaagcttcagcgacgatacggagaaaatggccgacgacattatgaaggaaacggaagatctgattcgggacgcagaaaccggcattgcagatcaggggaaggaaatgctgacacgaataacctcctccgatgatggtacgattgaaattctcaacttagaagaaccggaaatcgaacggatactggacaacgacccgcaatgccccccaacgccggaagccaccatttacagtttggtatcgtcgtcggatggtgctgctaccgagtccgaagccgtagattctgcggcaacagttatcgaacaggtgaaaccggatcccggtcatgacgaaagcaagcgagaagcaatcgaacggtgtagtagtaatgactccgagaacgtcgatagcgtcgagattgctgacaattatgacggtagttttgaaaccgataatatacttcctccggaacaacaacatccagaagctataacaaatgccttcgagcgagatgcgagcgttctttcgccggatggggatgaagctctacaggatgcattgttgaacgagctggaagacgatattcaacagtatgaggcggaacagcagcgacaaaacagaattcatcatttttctttcaagctgaattcagcagcgctcagtatcatcgaagaaagaactgacgacgacagcagtgtcaatcaacaatcaccagagagggctgccatggaagaaagtacgattcaaaagctcactaatttggagggagatgaagaaatacaccaggaaggtgaagtggctttcccagtcgactctgaaggaaatgaagctttagaaaatgtccaagatgatgaagttactgatgaaaatccagttccagttgatgatgaagatgattccagtgagcgcagtttaaaaggcttcgaagacgttgaacagttgctgaatatgatgccaccggtaacgaggttaagaacgctaacacgatttcgatcattcgattacccaagaggcggaattgaagatgatgaggaaagcgacgaagaacacgaggaacaaataaaaaatccaccgaagaaattcaacctgaaagactttaaaggtaaaatgcaatcagagagtaaattgaacatttcagaaggagacgacgacgagggtggagaagacgtagacgagaatgaggaggccgggaacgatgatacttgtgtgcctgatgagccggaagaaaacttcgatttggaagcagccatcgacgaggtgctgacggaaacatctcccgaggtgcagaaaacgaaatggaaaatgctcatacgtaccttgcgcaagattccctatcgagccaattcattcgatttatttagtgaaaacgatgaggatgtcctggagattttatttgagcaaagaagaaaggaaatgtttacgaacgctgacggagagtcgaacgaatccgtagacgattcgtaaatgttgcacttgcagcgtgcagggcaatgaacattgaaaggtttcacgctttttattttcttttgttgaatcggccattccaacaagtacacgtatttacacaacattgagtattccacaaaaaaccgattcaggtcgcaacattgactgtttattgtgtgttgtaaaaataatgtatacaataattaatagtaatatctccaataaacggaaaaagtaataactcagaaaaaaaaaa

SEQ ID NO: 592 - DNA, 479 bp, Aedes aegypti
gcttcacaccccgttcagctaatcagcaactacaacgacaatgaatgcaatgcaaatcagtttcctggtgatcgctgtcatggccgtcggagcctttgccgtgccgtttgatttcttccaggtgtccggatttgatgagtcaaacaaccagcagaatttcgaagatgctccaagcagcgttgaccagtcgcgggatgccccagttgaaccggaacgcgatatccgcattgaatttgaaccggaccaacaggaggaagttcggcggggagctgctatcgaagaagtgctgaaccgagacgatgccgcccaaaactcggcccatgaggattccagctcgtcggcggtgatgtccatcagtcagcggagaattgctgtggactcagttcattagggatgagagataagctttttttttttttaattttggatcttgtagtcgatgctttagacaggtgagaataaacaatattgtttggccc

SEQ ID NO: 593 - DNA, 2170 bp, Aedes aegypti
gaggaggtgaaaaaccataccgtgaaatggcgacaaaagttcgagtttccctgcaagatgacatcgaatgcgtccaccggagtgctggatccctgcacggtgcggatatcgatacgcaaggagatcaaagggggtaggagttttcagaaactagggtttatcgatctaaatttagccgaatttgcgggttccggcctgacgtctaggaaatgtctcctggagggatacgatacccggcatcggcaggataactctatgctgaacgtgtcgttaagaatgcacatgattcagggtgatattttgttcaaagttccttcgccaagcccaaagtcgaaagcgcttccccaggaaaacctcggacttggcctgcagccacccgcgtctgtcgtgggccctcctgcggtggtagccccagcagtgactgccaatcgcgtatcaaccaaagatgattcatcgatagcgtccggatcgtccggattcgactcgctgaccaagaagaaaaccccactgtttgccacttcgggtaagctattaaattataacaatcaatcccttctaccattatttctaaccgattccggtatttccgaatcttccgagccgccatcgtccctgctggacacgtcggttgcgtcccaggcgacgcttccttcgcatctcgggaccaacagcaacgcgcagtctgtcgtgggcaatgccgtgggctcaacgaatacggtgactagcacggccacagccgcaggaacggttccgggtggtatcgaaatgggtcattcccgtaactccagtaacactagtcaaatgtccaaaggatccggttacagtagtttttctcacagtcaacactcgaggcaaagctccgagggcgactctggacatcaaaggtaggtcacttgtcgttgaaattccattcatcccccgtaccttgacactgcaaaaaaacttctctccctagacactgtgcaaattggtattccgtttttctttttcgtttggtttttcgtcttctttcgttttatatcttatcatgtatagtttcgtcccacgtttacaatttcttctgtctttcacgagtttcgtttggtttttgtctagaaaaaaaaaatgtttctgctccgctattttgaatctcgttcggctgacatacaaatggcatttaagtagggaaaaagtatctctatattgtcgcctcatgcgatgctgataatctgcgacgctgcttctcgcagctgataaacttgcatatatatataaatcgctattcgtagaatgactttagaattgctgttgctaaataatctggtattcatcgctggcaaaggaagttcatctcatctaacagcgctgcctaacaaggttggtctgcgccgtaaacaaacgaccatctttattgaacgtcgacaaaatataggatatattaaaagtgtcaaataaattaagaaaagtttagaagacgtccttagttccgatctcttttcgctatactccaatggtaatacaagttattcactcaatttaggcgaaaccataagaaaagcggaaaattatccttttcccattgatgccccataatccttctcctcactactgtcgctttgagtgtttactttattttgatcttctactcctcttcatcgacaaaagataattcattcgtatattcacattcttcaaattcttaacatgtgtgtttgattgagttttattacaataactgaacgatactaacttgaagcacacaactaatatatcactatcatgaacataaatccgaaacgctagtaacctacggttgaacaggctgttctataatgtcgtatgctttcctgggttttagagttttgcgaattgtgcgattgatgaagtctgtatttcgcagacgaaatagacctgtagtaaccaaaaatatcaacaatcttcaaatatatactgtagtaacaaagttgaaaggaattatcccttctcttaccagtattgtgtatttatttcgaagtatttttttcttcttcaagtgagtgataaagtaaatagaagtgttcaaattcaaatagtgttcttatttcttattaaagattttgttcatataagctgaaacgattgcaatcacggcaaaaatcatccggccaagactttacagtcagttggaaagtgagggaatgttagtgtgtaa

SEQ ID NO: 594 - DNA, 928 bp, Aedes aegypti
ctgctggtgttatctctccttgtggcagtcattaaattaatatttcgcgcaaagaatgttcgcaatttataattgcctagtagtgttatcgacctaacgagtggccgctaagagaatttgtttggaccgcaagcaaaagtgcgctcccccaagatggagtgtgatgacgctgccgtcgagaggcagaaactcgtttcgaacgacgaggaagacgaccaagcaacaatcaccaatttgtcctccagcggccaggcaaaatccattcaaacgccaatctcgcccgtgcttagtaataagatattctccagcggcgaaacaactcgcagtcacaattccactagctatccggccagcctcggaaagacggagaagagcgatgccgctcccgcggccaggctcaattacgtcaacgagcggaagagccaggaagccaaggccaaacaaaagaaggttcaaagagaagtgccggacgtgcgacacatggaacgggccctgctcgggctgctcgaggacttccactcgggcaaactgaaagcgtttgggtcgggctgcacgatggaacagatgacgagcattcgggaacagcaggaaagcctggcgaagctgcacttcgatttgggcaatgaggcgtccctcagtgccaacgccggcaacaacgaagctcaatcgcaaaatggcatgcgaaaactggtggccaagctggagcagctctcattctcgatcgagaaactccactcgagcaaagtggagcagtgactcatttaggcggtagtttggaatgctttaagcggtaggtatgcatcaatgagtagatgtaggaacctttctaggagtcatgacattcgtgtttttccaatttgttcgaataatttaatttatgtaccttcctatgttgataaatgtgatttggtaataaaacatcatttga

SEQ ID NO: 595 - DNA, 192 bp, Aedes aegypti
atgaaggttcttgacgaattgaagtgccgaaagttagccgcatccaacatccaacgcaaccagtgcatcgattgtcacgaccttttctgttcaagaaaacatcctgcatccggcaagtgttcctcccctgatgaatccaaaataggacaagcggaatcaatcctggagtcacatcctggcatgtgcttgtga

SEQ ID NO: 596 - DNA, 237 bp, Aedes aegypti
cacgctttcttcgtcatcgtttgtttgtctgtcgacgacgactccgaaaacgtcaccggtgactggttcactgatctcctcgccgtcggctcaaaaagcgtttatcagggtggaattccagcaactgaagtggtatcacgcatcgcgagatatcatcatcttggcgcgcattttgtgagcaaacaagagaaggaagcgcccgcagtctttgatccagtttgctgcggaaagctgtga

SEQ ID NO: 597 - DNA, 2452 bp, Aedes aegypti
atgaaatttcacaactacagcagtccgccagagaaagtgaagacacgatccgtcagttcatcatcggagcaagagtccacacttctccagcaagccacggagcagaagcagaagcaaataccttccggtcagcagcagatcagcctgaagaagaaaattacgcctcagcaactgctcgagctgcagcagcagcgcgaaccactggccaagcgactccgcatcgacgagtctgtccccgtcgaggtggaacagcaacagccccacgaggaggaggaggtggaggaggaagaactcgacacatcggccacggaatcggaaacggaaatggatcagagcacggataatgaaatgataatctcacacccctcgcagcggttagacgccaatgcgttgaaggcaaaggccaccacgacggcaatggtcgtgacgacagacgattccgactatggacccaacgacaaacacgaacagaagaaagtcaagcggaaaatagtcagtaaaccctgcaacaacaacacatcgacaaaagcgaaacttcagatggtgcatgagtttcccacattgttcctgggactgaggcgcaatcgaattttcctggtgaactcgctggctcaaacgttcgacctcaatcagcgagatatcatcctgacgttgcgaaaaatcaaactaaacgaacacaatgctcggttagcgagcgtctttggactgactgacagtgaggtggacatcctgttccgtacgagtgtgcctaaaatagccgactgtttgcgaaatttcattgtgtggccggacgatgtcaccatgaagctcaacgttcccatctacctgcgtcaacacttcaacaaaatccacctgatcctgaactatcttgtggtgaaggtgaggcaaaacgccgtcaaatttctctctcaggcacagtcggaaacgtcctattgcgagggggaccagtgtcacaaactcaaatatctagttgcctccaccctggatggttgcgtgtgttttgtgtcgcgaggtttcggcatccaaacggacgacgaagccgtcctggcgcagtctggcttcctcaccaagttcaaaaccaacacaaacctcattgccggcaaaaatttccacaacttcgaagatcgcctgaccaacgggaacgatcacgatcacgaaaataacaacggcggaggcggcggtggcgaatccgacctggaacggacaatgaccaccaacgaagaggatgacaactttggcgaaatcgtgtcggagaaaatcagcaaaagccggacgttcaagctgaaaaactacatcgaaagtgtgctggaaagcttccagggacacatgatcctgtcgccgatgacgtgcgtagatgtgcggtcgttggaactgctagacgatattgtggtgatcgtcggggcgctcatcaacctgcagaagcaggaagtggaatagagaatgtacgtgcatccgtgcgcgtatttgtttgtgtgttcagaagatccatatcggccggattgtctctttttggcgcgcttgcccatgctctttttctcctgtacgattagtgcttttactttgttgacgatttctgttctttacgggaatttttttctatttccggtatccttcggagttggagtggcagaagggcccccgatgagggatacccaaaccatcagttatgtggttcgaatgcgctaggccgtattgtagataatttattataattattattattatcattgatgtaaggttaacgcgtagtaataacaaaaaaataaaagtttactaatgaagtctaaggaccggcaacagatttatggaaaggacgagttgaagcaactgaatcgctatactacagttaaactgctttcatagtttgagtaggactgggaagagaacacacggaagttgattggacagagagagagagtaggttctcttatgggatgcttcatgctttgaaattactgaaattatttcctgtttttcctgacatctcattattacgtaatgaatggtagcctttgaaattagtttttgtttcgacttgatcagacgtaacttttctgacatgacagatgaacgtaatttgcgcacgtaactgtaaaatatttacatttaaatttaccttcactggtacttttccatgttttacaaatgtacacaatttcttgattaagatcttcaataaatacaagtttgcttccattacttcatgttaacttaacagaaaatttgtgaatttcctatccgcttttcttaaaaaacatgcaaaaggttcctaccagagcccttacgattcgtgtgtattgtatcatgaaaaaaatcactgttgtatccttctttatccttgcgttttgaggcagagtatatttctcagtttactcttccttccataaaactttctttcaggatgtaactcgtacttcgcatcatgattaacttttgatgcgttggtggagag

SEQ ID NO: 598 - DNA, 2089 bp, Aedes aegypti
gacaatcgaaaaatgtgttccagtgtttagctttgtgctacgactatttgtatcgcgattccggaggtaaatttccgaaatttcgtcccttcccttcggcacatcatggctagcagctcccagatcccgttggctcagcttcagcctgttttcaaggaaatcgtcgaacacattttcaatcgctggaccgctcttcgactggcggtagaacatggcatgggaggaccgctgggattgaatactgcaatagaaattattaattatattacctgttactgtacggaaaataaaaaagtcgattcctacgacctgcgggaagttatggaagaaatcatggaccaggaattcgaaaccatttgtgaagatgagtccgttgatgaaatcagcgatctcctggtcaaatacctgaacatgttgaaggaaaacaaagaagaccaggtgaggctggaattagctcgaatgggtccgtgcgagatttggatcaagtcaggaaatagaataaaaatgcaatcgatggacgacagcagcggaaccgatgctgatgatgatgacatggatcaggatcaagatatggatatggagtcaacgccacccgcgacaagatcagatatgaatccctcccctagtacgcaaggttcaacgacacagtttctcgaggaagatgtagatccgggatggacacaggttcgcggtaggcgaagaagataaaacattgaatggggaataataatgcgtggctggaaaatcaatttcgtaaggattgtgtgttcggatgacgacctgtaatatatttctacctactcgtaacttacttctcatcgtcaaagctactaatgttccaatcggagtcttcctccgcttttgaaacttgaatcacggtggaagacagcttagggcctatctctttagtcacgttcaacgtggattccgccttttcgaccgccccaccagcgttatctcgatccaaattgaataggacacgttttttgggtatcggcttcggttgcagcggaacggcttccaagatgtcacttaggtcggaatcgttttcgatcgcacgtcgactgctttccacggtgatcacatccggagaggttgatagacgtttgatgggggtgtctagcaggcgttccacatgtcggtcgtggtctgacactgatggacgtggagaggttctagctgaaggaacaggacttcgcgataaggtttctgctagagggttgatttccgcatgaaccgttatgacgtcatcgctggtaagcttaatctccggtgccacaagtaaagatgagccggttctggttttaaacaggttcgatgtggtttctcttggttttggaactgctgggcgatcctcatttactaacttcaatttggatggtaatatgtcgataactggattatttccggacacttgcaacgttgaccgcagctttgggactggttgagaaggcgtctcccgttttctgacaatcggttgatcaactgttttgctgcgaagagttcttggtttcggtgcttctcccagtcgacttcttgctagttgatcaacttttgtcatcaactgatttctggttatgaagaaaccgcgattttgtcttttgctagcatctctacgctccgccaaagtttcggtagcggcattgagatcttctttagatattgctttcgttttggtatcaatgcccaactgttttaaacgggttttaaaggtgttcaaaattagctttttaggtgataacagtggtttctccaggctgctcacaattggcttttctttggattcttccatcgccggcgcagagacattacttcgtgacagcaattttgcttttgcagcttccaaagctctaatctcctcatcactttcagactgatctgtttcatccggagtgctgtcttgttgcgcttcaacctcattaaccttatactcaaatgttgttcttgatagtgccgggggaagagatgacttcaaatctataattggcacaggaatttgcaacagtgaactatcgttaatcacccttttggtttggtcttgtttggcttcattcgcggttgtttctttttgtcgctccaccatttgttc

SEQ ID NO: 599 - DNA, 315 bp, Aedes aegypti
atgtcaaagaagccaaggtggctaaaactgttctgtctgctgcagtgcgttctgctggcgcttagcatctcccactatgcccatcccgccgtactggaaaacgaagcccaggaagcactcctgccggactatctgcgcaatcccttctaccgaactccccgggtggcaaacgccctggcccgcttcagctggattggccccggcgaggaactggtgcgggaacgacatgccgagaaaatctcccgagccgacatctacagcgtgctgacccatgccggattcgttccgcggagattgcatgggttcaatcgttga

SEQ ID NO: 600 - DNA, 938 bp, Aedes aegypti
tagttcagacctgagagttcagacgttcagacgatttttggatatctgatcaaagttttaaaatattcatcaagaaaagtgctaaatatatgtactctaataacttttcgagtcccgcctcgaaatgagctttgaggacaaaaagaaagcgctgtttgccagtttggaaagtgccgagcgcagcattccagtggactccgttttgcaccaggatgataacgtagattacgatcagcggcgacgaaccgatcgggacagcggaagccgcaggaatcgaaggtcgtcgtccgaacggggcccgatcaggaaattccgcggcaaagaaagcatcttcaaaaggccagcggcgccgatatcgaaatgtttacccatgtcccgggttccggatttcaaaaaaaatccccaaaaatggaccaaatactctctggaagatgtggacattagtgaccggagcaacactgctgccgcgttcagctttctgcgagaaatggagaataagaaacaagatcaaccctccctggaggcgaccggtagcgaatccgccacccatggattccgaggcaaagttaaatttaaccggtcgatcaaattgaagtcccagctggaagaggagcaggaaacgccgcccacggaggaagaaaaaccgaaggttaaaagtacgaaggtcgttatgccggagtatgtaattgggcagaaagtgaagaagcccaaaccggtcaagttgggtatggcgtccagcaagcgagatcgttcgaaggaacttaagctggatcatctcatggatgaagaggaagatccagacggagaggatgacgatgatgaaatgaattgaaaataatgaaattaattagatggtaagctttaaataagtggttctacattaaatgtaatgtaaataatttaggtagtctgtcaaagaagattcgaaagaaaatatc

SEQ ID NO: 601 - DNA, 894 bp, Aedes aegypti
acacaaaacaaaacaaaaatgctaaactcagtgcaacggagaaattgaaaattatcaaaaaatcactgttactaatcgtttttcacgccaaaaaatggatattctgcatcctcatttactcagcaaacaacagctattggacatatttcgacagcgccacatttcgatccctcgcctggaggaatcgacacgcgatgagctgatcagtctctactcgaaatatcttctaccgttgccacgaaggggaggatcctccagcaatccccaagatagttcctccctcccgcaagacgtcgaaatggccgacgcctcctctaaatccaccaattcgaacggcgacagccggagaccgagctcgaacgtacgaaatcggatcgtatattccgacagcccggtggacaacgtaagccacggcatgaaacggatcaaactgatcaataccggcggagggggagcaaatgtggccagcagtcccaaaccggtcatggtaaaacgaacgctggagattagccctggcaagagcagctcgatggggagtgcggtcagtccagctcccagcaaacggcaaaagataacgtggccgtagattggaaccaacctacgaggtaaggtaggttggatgatttaaacttaagtattggatgtgaacaagtcgacaggtaattttaggtaataaacgtgatattgaacatggtttctatttgtaggcttctagtattgaagaatcatttttaggggaatccttaaaaattcttggggtaacttttaaaggaattcctgggaaaaacaaaattgtggaagaatatagaaaatttctttgaattcctatagtcagggctattcagatacgtgttctttattttagtgcaagaatctcgtttttaatggtaggtc

SEQ ID NO: 602 - DNA, 1461 bp, Aedes aegypti
atgtcatttatgttgaaatattggtttaatatcgaaaatatttaccaaacaattcaaccggcatgtcgctgtatgaaatggttcggctttatgctgttcacattgtcggctcctgagccgggcaaaataaacgattcgacgacgcagcttcccccattaacccttactcgaaaaaaactggatattcttctgctggtcctctggcaaatatacatcatatccatgtacaacacacactggttttcgtccctgttcaatgcaccgatgtcgaaaatcatgatttttctctcggtactgatgtacgttctcgagggaatccttacaagctgggtccagctgcggacggcatttagtcgggccaaaattgacgagcttctgcgattggttcgcttcttcgacgaattgatcgaatccctcggactggcagtcaatcatcgccggcaccatctggggctggttttgctgatcttcggcacgataatcggtatcattttcgtgacggcaatcgagctcgcattggcaatgctttttcacgagaaaatctcccccgtatgggaacagtttttcacgaccggtgccaccatttactactacttgcttcgaactgcccaagtgagctcactggtgatgttccttgctgcgatgctggcgtttcgggctcgcttccggctgttgaatgaggcgtttcgcaaacattttctacaaaaagaaagcagcttcaatgttgacgatacacaagaaactttacgaacaattgctattggacacgatgcactgacagaagctgtagatctattcaatgacgtctgttgtctgcaaatggtttacgcctgtgcctcgtacgtgatgttctccatttttagcatgttctgcattggagccctcgtctcgtaccaatcaaccgatgtcctcttcctgtcactgttctacacgatagcgttcctccagtactcgctgcacatcattccaatcataaaaataagcactgatgtccgaaacgagggcaaacatatagccgtgctggttcataaggccataaatcaatcaccactttcggtcggctcaatcaatcggctcatgctgttctccaagcaacttcaacagcagacaccggccgtttccagtgggatgttttctttcgattggacactgtgcttttcgatcctgtcgacggtggccacctacacgatgataatggtgcaattcgagctggaggtaccgaagttcttcctggatgccctggtgagctcaagtattgagcagaatgcagcgctgaatggaactttattactgtgaaaggcagtattatgtgcgagttgtgttgctattgggaacaatgaacgaaaatccaaaatcgaaataaaaaaaaatgctagaaggtatggatgaatggtttattacggatatgtaacacattttctttaaggtaaggtaacgaaaagataattctcattgctattt

SEQ ID NO: 603 - DNA, 885 bp, Aedes aegypti
ggataaacaagtattgacgaacatttcagtttctgcactgaaccattcatttttatgagaatttattgtaaataaattgagtcctccgcgtaagaaaacgatgacatcgcgtagtttttaggtacaaaaaagcaattataatgttaagcaacgattgtggattgagaacgctaatttaatcgagtccgtatgtgtagtgaatgccgagataaaactccctttaaatggtgcatcatggatgatgaccttcaaccgctgaggagcgacgaatgccttgagcagaacaacaataacgttatagccaacgacaacagcgagggagcagttggcggatctgtggaaaacgttgatccgcaaccagaatccgagcacgatgaaattgtatggagcgaggaagagttcgaccgtgatccacatagggcgtacttttatgatgcataccgttcggaggcaggatccccggaattggacgattcgacggagaacgcgggagcgacgaccccggaacgaaaaccgctggccctgatggacgactgggatctctgggactacatggacgaggagacgttgaaacagcgactgaaatatcaccccgaactgttggaacaaatcacacggaagagaaagcggaaagccggacttgaggaaagcgacgatgacgatctctgtgcagtgatggagaggcatgctaaagtgacgaagtttaacgaacatacaaaagtgtactgaacgtggaatggtttagttttgatgttcatgggttatgttttacaaactatctatagcgaagtccaatttagcatgtgtaatattgatagtaatctttcaattttagctgtgtactataatctattattgtaaatatatttttttatcgattgcttc

SEQ ID NO: 604 - DNA, 877 bp, Aedes aegypti
ctatcataataaatcgtatgaaatttgtctagctaacattaattttccaataatggctttcctgaacaaattagtgctgtttgccggatttgtgtcccttcttcatgcggcatactcagctgcccagcaccgagcttatctgagaatcacggatcaggaattcacaaatctcccagttgatattatcttccaagctattctcagtctcgtgttgattatctataacatcctgcaagtggtcggtgacttcaaagaaattcgcgcagctgtggatctgcaggccaaatcgtgggaaaccctcggaaacattccttcgttctataccttcaatcaccggggtaaagcactatccccattctatgaacagcccaatccggcagcgatggatcggtccgatttaagcacttttgagtgattgggtaacacattgttctacgctagtttgatgggaagtatgtaaaattttctaatcttcaaatctgaagtacatagggtcaaatgtaatactaatagcaaaagggcatcttcagcggcgtcacaatttgtatggagagtcacagaaattttaacgctgctgaagatgatcaaatatctgtttgacgctttgtatcttcacatccttagccattttttcaaggacataatcaaccaatcgttgccacatagcgtccaacagtttagatcttaccatgcgatagaagaatttaatacgccatagtattccggacttcatattatgctgacaaagagattctgcccaattttaagatgtttgcatattagtcatatgtttgacactttgtactgatagcatatcgtttgaaatatgtaatttatttgcatctaaactataataaacatattcctttcgaatttt

SEQ ID NO: 605 - DNA, 1144 bp, Aedes aegypti
cgagtgcgtttcgcttattttattgctgcaatttgaagtaaaaatagttgaattctagctgtgcattcataatagttggtatcccgcttgacaatgagtgccaaaaactcggccctggcatcgttgacggccacatacacggattccgaaaatgaagacgaccacaaatcggacgacggatcgatgatggcttcggatgatgagagttcttcctcgcagaaccgtgcacgttcccgacagcagacaccgatgcgtgatccatcagaatcctcaatcacaccacccgtggcaactttggccgtttcgaagccaacaacttccgcaacgactgctagtggttccaatgaatctttcacttctcgacagaaagccttgcgcctggttagctacttcgacgacacggttgtctctgatgacgaaaatctttccccacatcgggatcaggaacggatggacatgtccgaagacgaaactccagcagcggaaacttccgtgtcgccaaaaaagatagacagggccaaattgtatggattcagtttgcctccggaaccgaaagggaaatgctcactggaattgcaggaaaagatagcgaacctttacgaaaaaatgcgcaactcaaatatggacaccaacaagattatccaggagcggaaagagtttcgcaatccgagcatttacgagaagctgatccaattctgcgacattaacgagctggggacaaattattcaccggaaattttcgatccctcccagtggggcaaagagtcttactacgaagaattggccaaagcgcaaaagcttgaaatggaaaaggtggaaaaagccagaaaggaaagtgctaagaccgaaattcaggtcggtgtcaaaaagatggatccggacgattcgaagaagcgcaaatcgaagtgggatcagccaggagtgttgggagctgctccaggagctattggcacggccactgcccttaaaccggctggaatcatagctcaaacgctgactgcaacagccaccggaacgaaagggaccgtcatatctgcgtttggttctttgcccaagaaaccgaaggtgtaggattaatgtgtttgaggtaagctgaactttatgttatttatactttgtacaataaatagctttaaacaagatt

SEQ ID NO: 606 - DNA, 255 bp, Aedes aegypti
ccaagtgagaaagattttggcggaagagtgaaagagatcagcaagcatttctttttcttttcggttttgttttcattcctccttccgagagaccgcagaagctggccgccagagttctatctctgctgctgcaactgctactccatagtcattgcgcgagtaaaattgtgtgaagggactcgcactgcgtgcaagatacgaccatccctccctcgtatcaacgtcttcactcccccttccgtctgcctagaatag

SEQ ID NO: 607 - DNA, 1259 bp, Aedes aegypti; identical to SEQ ID NO: 218

SEQ ID NO: 608 - DNA, 828 bp, Aedes aegypti
atgccccaagacaaaaagtgttcaagttatgtgtcaaatcaacttggtcccagcattaccatgctctcgtcaacttcgctcctgcataacaattgtattttcaatcgaaacaatactgtcgccacccagcagggtctcaagacatactggttgtgtaaatcttaccgggtttcgatgtgccgagcccgttgcatcacccatcacggacaggtcatctcttccacgggagttcacaaccatccgcctcacatgaagggtgcccatgaattccctcatcaacctccgcaaccgcctccgccacctcctcctccccctcctaacttaggaccacctgctgctccaccccctcagtctcatgaacatcacaacgtttctccctctttgaacaacggagcatattacgagttccatcataatcctcactaccaacccggcccgaaccacgtggcgatgggccctcctccacatcatgatcccagtcagtacccaatgcatcaacagccaccaccttattctgaaatacctccccataatcaccatcatcacccgcatcatccatatcacccccacccgccctacgtcaatcctccaatgccacctcctcagccgcctatgaaccttcaaccgtcgaatgattcacagccttcgtcatcccatcatcagcagtcggagtcagccgctgccccatccaacagcattccggaaccggaagttccgcccgacgtcaagctgattcagcttcaaccgccagtggtgcccccggttgattcgactggcgaaggagtaacaagcgagcagcttgaactcaagaccgaacagctttcctag

SEQ ID NO: 609 - DNA, 537 bp, Aedes aegypti; identical to SEQ ID NO: 574

SEQ ID NO: 610 - DNA, 4373 bp, Aedes aegypti
tcatgattgaaactttagcaggaaatgcaggaaattttgatggagaacctggtgaaatctctgatggaattcctggtgtaatccttacaacaacttctgatagaaagtttttctaattcaaatgcagcaaatcacatggcgtagttaacgtcatgcggtccaagacacgacccctactgagcgctatattaacgacagaatctagggcgctgaggtcacgttgattgtaggtaatttagaatgtatgtgttgttcggaaattaacagtagaatcataatttacatgctctactccattgttgctatattatttcatcatcttatttaaagattggttcaggtgcttaatgataacaattccagttgcattcatacgcacatatctccctagtagaacatttttgatataattggtgtatttaacctttcagtaggtgttgctttcgtctttcttttgtttcttacctaattgcctcaaccagctagggaaaccaacaactaaccctcatcacacaccacattaaggtcaaatacgtcccatgatcttcaattatttgtatcaattgtgtcacgagtggaatcaatgctacacaatcattcaatcagcgttcaacggcatttgtcttttccggacattccctataattccgcgccgccgccatgcatctcattactcatacactgctccactttcttcccatccgaaatcgatcacactcaacacggtcagtccaaactgaactgcgaagtgctgctggatgacctggcattcgaggtgcgatgggccgtcgccggcgagagcatcgtcatccaattggtagccaaattagaggatggagagtacatgtcattcggggtgtctccggatcattcacgcagcataatggtgggagctgatgtggcagtcgtgtgggttgataaggctaccggaaagggatacgctcaggactactatctggatgccaagtcgcagtgctctggagctcgcggaagttgcccggacacgaggatcaacgaaaacagtagttcgatccgtctgttgaacgccgccatggttaacggttactccatcgtaacttatcaacgaccgttgagagcatcagatcatctggatcttccgatcttcaccaacggatcgcaagcgatcgtttgggcaatcgggcctctgaatcaacgctacgaagtctcattccattcgcagtacttgaaagatactaagcaggttgacttcggccgtcaaccgtactggaattgccctacaccggaatcggatcaacagaagcaacatgagagccctcagaaactgcaaagtctagagccaaatcgtcgtgtagattccatgaaacgtccgaatgcaccggcaaccgctcgaccgcccgctaaggctggtgcctgggagatacctccagttcagtgctacgaaccagaagatggagtattctatgctcagatgggtcctaccggaggcaaacaaggctatccagcaatcaccggtcatgttggatggggtatctcgtggtacatcaatggacttcttatcccggaaatcaacgtggttcgtggtaaaacatacactttcgtaactgaaggcggcaacgatccagagactcctgccaaatatcacccattctacattaccgatgattctgttgggggctacgaacatcaggacgaggaagccagaaagaatattcgaatttttgccggagttcaccagaatcgcaatggccaactagttccgaatggcgttgggcggttatgcaactggactccaaatcctgatggtccccctgcggactcgtatccttcgtttggtgcttaccagagaagtctcaccttgaaatgcgaccccggtgagccaggaatcatcacctggactcccgatgccgacactcctgacaccgtctactatcagtgtttcactcatcgttacctgggatggcgaatcaacgtccacgatgcgtgcgatgtagctgccccgagcgaaatcgatgaggtctacgtggatcctaacgaagaaggcattaatgctgaaccgtcaattcgacacgaatccaaattgctgccatcagacacattcctggaacaacatgagaactttgttcagaaaaacgataaggatctgatcaaaaaccataagatgaccgctgatcaaccaacggagaacttgaagttggatctagaaaacgacccagaaatgtccaaaatcatcgaagaaggcatccgagctgccgaagacctcgaagaaaaactgaagaacaatcaaacatatgcaaactacacctccaatgaacagcatcctctgtctcactctgaaatcatgcaccatggaaagccgattcttagctcctctggactaccagtttatctacgtccgccaaatagtggtccgatgttccggccggtaaagcttcccatgagacgaccaatcgccgttgaacgacgccccgtcaatggtcggccctctcgcccatacaacatacctcagccttccatgatcatcagtcactaccaaaaaccggtcaacccactgatgcgaccatttatgcccaaaacaaagctccccatgaaagccattgcgccaattttgctgctcggggaaccaacagaaatcaaaccattccgcaaagttcctcctccaccacctccacagtcaatgattcatcaacctatggaaatgatgctcgtgaaacccatgaaaaccgttccatacatggttcccgatgtttctccacatctgaccatgagcctcaagaagatcgaacccgctccgatcacacttcccattcgtctcaccaagcgaccggtcctggtagaaccccaaaacgtgaaaccaatattcaaagctccgtatgacgttcacgaaaacaaaacacccgttgatccgcagtccagcgtcggatttgagccaagttccgtagtagtagaaagtggattcaaaccgatctaccgtcgcaatggtatgatgaatgccgaatacgacgatcaactgcgccatcatggggatatgattcaacggcgacaggactacgatattgacgaagccatcgagagtgatgctttgatgattggcagtggagaaccacagcagcaggctttcgaacctatgttcattccatcaccactggatagtatggctatggcgcacaaatcagccgaagttggagatcgaaaggatggcattgaacggttaactggcgacttgaaggaaatgaaagttgaagaaggtgaagataagatggcaatgcctgacgatcgagtagattcgtattaccttccaccagagacgcaaaacgttgtcaaagtctatccagaaggatccgtagtttcatacgatggtaaagcggtacttgatgtatctttattgaattcgccgagcaatgtccgacacgaagccattaagtccgtttccaagacagaacaattcatcagagacactccccaattcggacctttccgtggagaaatcccacccatctctgattacgttgcgccagactcacatccaatctacggaattcgtggatcaaattcagtacaaccaccagtttcagagtatgccaaccccttggtccccggtggcatcaacgtgcaagacaacaaagatctcagtgtaaaacccatctccaccaaactatcgattatcaagccagttgaagaacaaccggaagagtcccgaaaaaagcgtgaagcacatcatcatccagaccaccacggagatagtcacgatgacggctgggaagagcaacgcaagagcgttagcagcacgtcgaccatgtcaatggcaacactgctttctgtagtctctcctttaatactcctccgaagagcgctgtaaactcccaccatcataacgctcagtgcctccttgctgcataatttgttttgggttaagtattgttagttaagttttatttaaatcgaacacacttcagtggaagtgaactacaaaattgtgcttaaagttttacacacaaactgtaaataccaataaagatgccgttcgatggcgttccaattagatcttgagtcgtcgtttgatgagattgatgaccccctgctgatccgtcagccgagcgtagtccaacggcatcagtcgatttttgtctcgaattttcaaccgacactttctctccagtagatacttgataatctccatgctggtgtgcatgtagatcgctcgaaaaatcaacgtccagctgcagcgatcacgtgactccgtgctccctccgtgcgttagaacaaacttcagcgtgtgtagatcattcgtgtcgatcgcatagtgcccagctgtcattccaatacagttcccagcattgatatctgccccgtgctcaagcaagtgacgggcgatcttgatgttcttgttgtag

SEQ ID NO: 611 - DNA, 1990 bp, Aedes aegypti
gtcaaacctgagcctatttttacgttgtacgataaaaatagtccaagacaagcattctcgataattagtacttagtcgcatcctcgctagcatgcctagcgacgcgaaaacttttatcatcattagggaagatttaggatttgaacgcgcgcaaaaatccgagtcagagaagtcagtcgagtgaagtgcactaattaagtgctgagttcgtgtgatcgtttgcatacacgctgcgctccgatggctatcatcaacatttaattcccaatcgccgacagataagaagaaaaatcacatcaaacgaccgatgaacgcctttatggtctgggcccaggcggcgcggcgggaaatgtccaaacaggagcccaaactgcagaactccgagatcagcaaggatctggggaagatgtggaagaatcttgccgccgaagacaaactgcccttcatcgagcaagcggagaagctccggatgacgcacaaaagccagcacccggactacaagtaccaaccgcggcggaaaaagtccaaaaagtttggcaagcacggaaagcactgctgcgacgaggactgcgaagattccaacggttctccaccaccacctccgaagccacgtgccaaaaaggccgccggtgccgctgcaaacaaatcgaaggcgtcaaaccagtcgaaggcagctgccacgaccgtgctgaacaccggttatgatttcaccaatcagcaaaccattataagaattgctcagccgacggccgatcttccgacgccctcgtcttcgacttcatccgtcgagcaatatccgagttattcgatgaaaacggaaagcggaaaccgattctacggaattggcccatgtgagatggagacaccttgtagtccgcagagccctagcgcaacgtctatccattcctctacggaagaccatccactgacgccaccaaccacgccgtacaccggactggccaacgtcaagtccttctcaccacattcccggttgtccagcaacgacagccccgtaggctacttcaaccgcaatgactacatcaacggcggaacggccaccgattaccgcactagcgaacagtggagctacgcggccaacacactttccgcttcgtctgccttcacatcacagacatccagcaaagacttctaccgcaacttcccgaaccaaatgcaccaactgcacgactccaactccatctcgtcctaccatctcgctccctccacgcttcaatccactctgtcctcttccccaatcccgtctctcccaccggattactccacgctcacctcaatccccagccagaactacctggtatcccccttggaccaggaccaggtcgacatcgagcagtacctggacagccaagccgtggtcaagagatccctcaccgattcgctcctccatcaccatcatccgcaacagcagtcctctccatcgccccaaacggccgcctcatcgctggatgtcctcagctccgatcccaccatgggagccatggccatcgacccaaccgcccaatcctcggtgtactacgattcggtcgggtcttcatcgtccccatcggtaccggcgcagcatcattcgccgcagcatacgcaccatcaccacctggcggcccacctgcaccatccccatccgcatcatctgccgccgggacatccggggcatcatcatcaccacccctcgatggcgtcccatctgccgtcgtactacagcagctggggcaccgggaactacgggaccaattcgtaatctaggcatacgggaggattttgggacggaagggcgttagtcaataggtttgcttaggtcagtaggttatctcactttaaatgttaaacttgaatggttgaaaggctggatggatgaaagaaaattaattgtatctagatgaacaatcagaggaatacgcctaattttcattagttactactaatacgttgacttctctcaagaacgtttctcataaagcagttttgcataaat

SEQ ID NO: 612 - DNA, 1272 bp, Aedes aegypti
atgcatgatgcattcacggacaggacggtgcgatggctccaccatccgaagcagcttcactacccgagtgggtatccgatgccgcggtcaccgccgctatttatttgctcgtcaccggggccggacccgtaccgatcgcatgacaacgtgtacgaggagctggagcatccccgcgatacggactcggagccaccggtccaatcggacgacgactttgccgaggacgaactgagcctacccggtgaccggtcgtttcataaatcatcttcggacggtggcacgacggtggccacaatctatcacgaccgaagcgctagcagcaatgggggaaccagcacggaccagtacatggagcggaaccgaaccgaacgtaattcgttgctctcaaagcagcaatcatcgacactaggaagtggaaggggcaataagcatttgaacaatctaaactcgttggccgagccttctagcgaggtgtctcatacattgccggcggggtgtgacgagcgagctatgatgactttgccaccctcctatcaagcagcagcggtggctagccgaaccagtcctaataatttgaatagtatcaacaataacagctttgtgaatagcaatagtttgaataacaatagcagccgaggcaattactacagtacaatagatgatgagtgcgatccagttgaacggcggaaccggatcaatgcgcaactgtcggcttcggctgcagccatcaacaatggcggccctggcgtgtccaccatcttccgcaacatgcggccaccccaatatcccggcaacaatcacaatcatcataatcatcaaacaacgaacgcaagcagtcgatcacggacgaatccacgttccctggatcgacggcgctatcttatcaataacaataataacaacaatcatagtcccggtagcaatctagcggtaatatcttcccaagatccctcccagtacatctaccacgagccggtgtttcacgaaggactcatctacgatgcctgcttgtcgtacagtgatcgaagtagtggaggcagtgccggacctccgtatccctacgtcctgccacagttcaccaccttccggaatcaccacggccagcagcaggccatctactcgagggacagcagtttcgggtccgattccggctacagtcagcacacgcaagcatcgaaccgtagtgtcggctggagcaggaatcgtccaccgcagccaacgccacatcaactgaaccctcccgagcagcaaccgacggtgacggactcttga

SEQ ID NO: 613 - DNA, 4607 bp, Aedes aegypti
atgagtgctgaggagtttatttatagcgtgatcaacagtgataacgtagcccagctggatctgaacgtaatcgccaacacgctggccagtgcggattcgctgatccagcggatcaaggcccagcaggtggagaacgagggcctgaaggagaagatcagctcgctgcggagttccgccctgcaaatcaagcagctgtacgaggcggaagtgggcaagaatcagggcatcgtccaacggggggaggattatgtaaggaaggtgcaggaactggagggacgggttgccgcggccgagaatgccagggtcaatgccgaactgcagggcaaggaaacggtggctgagctggagaggaaggccgaacactggatgggaaggtacgacgggttggccatggatatggtgcggaattgctgtctgctggcggacaacggattacttccggcggaacagctggggaagtaccgggattggaagtgccatgtgcaagggatggtccaagacgggaaggaagtccccgaggatgtgctgagctgcttgagcaagaagcgatcctcgtcgtccttggcgcggaagaagcgcaaatcggaggcggaatgccgggatcaagggacgatgactgctggcccctcgtactgttccattggggtcaatgccgtggaagagaaacctcgctcagccgattcttcaacgagtacggaaggtttggaaccagctaaaacgcaatactcgatcacggatgatgtcttcccggtagaacctcagcctaagaaagtcttcgccgacaagagcacgatgtattccagttccacggtgacccgttccacctgcacttcggccttcatcaagcgggtagacgtgggggtaaacttccccgaagttgttcccaagtccattagcgaaatcctccgcgagtgcgtcatcgagcttccctcattactatctcccatcctggacgagattccgatccggaaagaatcagcctccacccaaacggattccgcggacaaacctcccctcgtcacaaccggtaccaacaccaccttgcgcaacattcgtcggaaggtggactacgtgaggaaagcggacggtctcctcgttaacaacctcctgtccttcatcaagaaagaggaaagcatttcccctgtgggttccctccagaacctccccgcagccgttttccaaagcgacccatccgatgtcaatccccagttgacgcacatttggggcctactgggggagaccatgttccgcctgttgggtaccggacggatgttcgacagccagtgctatagcataatcaacgaaaggatagccatgattaacagtctgatcgagtcggagagtcgccgaggaacggccatgatgagtgaggtgtttgcggcggcggctacgatggcgtcggataaagcgggtgaagttggcggaaagaagcgtgctgttgttggggaggaaccggtggtcagtcgggggaagagcatggacgagtacgaggaggatgccgtgggaatgcatgaggaggaagactctaacgggccgtgggaaagtcaaccaccgctgcccgatgaagaggtggagccacaggaagatgatgtagtcagggatgaagaaactcagacggaagtgataccttccggcagtcaaattagtgtggccgtggtcgaagctgcgatgaatacggaggaatcttcagcgatggctgctgcagcagatgatgtgccagaagcgacgtcatcagcttcagtctccaaccaaaccaaagaacaagacgaaagtccttcgtcgccaaaacccccacgtgagtcaccgatccccgatgaaatatccccggaagcaccatctccccaaaacgacgaatccgttgacttttgttctctcatggaatccggcagtggcgccgtcgaaatctgtgcgaacagctccgcaacgaaagacgctgatgaacaactgccacagctgcaggatgaagaaccggacgagattgcgaacgagttgcgccagatggaggaaggcgtcgcgaaggagccggagctggatcgacttcaaccgtgtctgattcgcgtgcgggacatagaacaggtggaaacgaaacactatctggatgtggtctgtgaggaggaatcctcgcataccacggatgacgagagtgatcttcatatgacgatcgtggagacgtctccaaatcggttgtccgtcagctctagttgtacttcgataggaagcaacggaacgctgatttcgcccatcaaggtcaaagagaccaatgagttggtcaaggatcaattcaaaacgccaactagtcccgcgatcagcaaacggaaactcagagagcgcacggagggaggcccatccaagcgggggagattgtctccgacgacggaatctttgctggaggacgactgggatcacaagttctcccggataaagaactacttcacgctgccgtcgggtttgaatccaatcaaggatggttcgggtgggtcgcggactacgcaggagtacttcgagttggacgaactgtggggcgatgaggatgatgatggagatgagggagaggagaagaagggcgaatttgggatgccttgtgagcaactgttgcaaccactgcggctcgacacgagctcggcggtaaacgtggcggttagcgattctcccgaatctcccactgaagcagtgaaaccgatatccggtgaccatgtttccgaaacgaatgcaacagtctgcaaattgaaacaggtgattttatcaaaaccttcagcaacatccatctcaagttgggatggattcaaaaggcctctcaacgttgacgtcacccggcctacagttcctccgtcaacactcagcaatactcctgcttcacccgatgctgcctctgcatttttggacgattctccaatgtcgccaatagctgacgaagaaccccgtagtccccgctgcttcagcgaactagagtcccccatgtctccgcctcccgaaagccgatcaaccatatacacggaaccggtggaaccgcgaaacattcctctggaaaatccgctagcgagccggatactaaccgaagcatccactccaatgggaaaggccattgcctgctacaagagggaaaggcgcgctgaagtcctgaacaaaattactccgaatgcgtgtaagaaggagaagaagctgatccaagagctggtcagtgtgataatggcttatgtgaaggacgaatggacggcggaaaatgtggacatccgaagtaaagagttgctcaatgtttcaggagataccagggtgatcgctcaagcgatagtagattgtattatgtcccttacggaggatctggtgatcgatgttcagtgttccccacctgctcctccattaccgaaggccacgcaaaaagtggttctgctggcaaaaacgcttaatgaggtgttgttcacgctagacaggatactccttcaagaagtggatcgccgggtgttcaatctcaagtcggataaaaccgacctggcagcgatcactgcactgacctatctctacgtaggaatagccgactgcaatcgactctacggttgcactgccaggatgtacatctacaagtgtctctactacttcaactacaaaggtctacccctgatctattacgtactgaaggccttcccgcatgcactgccaaagaaggccagcgcctttttcgataattccgatgcgatggtcagcaccatccgcacagttctcatgaacatcaactacatggagaaaagtactcaccccgaagctgccctgtacaaaaagtgcgaactgcagaaactactcaaatacttctacggctatcagcacgggtctccgacgtatgccgagctcatcaccaacctgatcgagaagatcaaagctaacaagctgaaaaatgtcgactactgtctgattctggtggccaaacgccagggatacgagtgggccaagcggcacattgtccagaagcacctctaccccctactcaacgactacctcaagcggatcgaaaccgttcaggggacgcacgacgatcagatccggtgtctgatattctgcatctcggccatcctcaaaacccagcccaactacgaggacgtgacgggtgtgatgcagatcttcggcagcatcatccagcggacggacggcaaccaaaggctgcaggaagcggccgtcgctgggttgatgcggtttacccggttcgattacgccgacatctacgagtggttgtgcaagtggcgcccctcgtatgaggttagcggccgaatcaagctaatgctggccacgttcgtccaccggaaggacgaacgcttctggaagcaactcggccagcggaagttcgtgtagtctctgtgatctggtgggaattgttgtaaaaaaccggttatttattttcgaaggccgaactccttctcgcttcgtagtaataatagtaagcttagtagttttccgttgtttctttagatgtaagcgaatcaagagttaggtttaagtagattgcgtgatcctctattttcaaagaatgtggaatgtttggaagcaatcgggcgaattacgggtgctttgcgttgaactgtacatagctgcaaagcactcaaatcgctgcaaataaaact

SEQ ID NO: 614 - DNA, 1147 bp, Aedes aegypti
tgtacccgaagatagtgcttatcgatcgtcgcgacaaaccagtttctgtgagaattttctggtgacaataatcgaaattgaaatggaacgatcgctgttgagtctatcgctggcgattgttttggtgcttccggtggcttggaattacccactggggaagaatgtgtttgcctcgcagaacggtgaagaatcagagttcagggacaaggctttcgacgaggagattcgcaaagtgacatgggttggagacaaacctgtccatgcacttgaatcgtatgacaaccctcccgatattgacaacgccgctcgtgagaaagacaacttcccatcgaacattttcagcaaatttgacaatacgcagaagaaagtgaaggattggttcgataccccaccgctaatcgacaccatcaaagaatcggacaagtacggcaacgaaggcgatcagttttacttcattacccgaccgctggtcaaactcaccgaaacggtatcaaatacaatcaacaaggccatcgcggcccctacgcaaatctatcgatcggcgaaaaagatcgtgtccgataaactgaacgatgtcggcgctggattagtcggtttgagaagatagttctctaagttgtgatatgtgtgtaaataaatcttagccattcatgttagtttgtaagaatctctagactgatataccagtaaaactctacgcccagcgacgacgtttatcgacagttaagagaaaaaaagctttattcgagtcaagttgagtcggtgacccagtttgtcgacgcaaaggccaacaaccgcagactgcgccgtcatctcctttcgccatcgtatttcaaggttacaacagctacggccaaacagcatgttgaagatttcgcgctcggacaaaagcgaagacgacgaaccccaccatcatcagagcacgtgttcaccgaagctctttggttccgatgaactttaggccgccaacactttggttgaaagtgaaaatgaattcaccgcgctcagctgatcagcgtcgcggtgcctaacgtgttgaatagcttctaagataaagataatcgtcaatgtgaacaaaaaagacgcgattcactcgcgagcagcaaaggcttaaatagctgaccaaaataaatacgcaccgaaaacg

SEQ ID NO: 615 - DNA, 444 bp, Aedes aegypti
atgtattcaatttgtgctaaatccttttgcggattcatcccccagcaaacggccatctgtgtgcaattgatccggaaaagattgcctctacgacgacattcgtccaaagaagtgttcaagtgcagcaaggatgaaatatttttaattaaatgcaacatttccccccggctgccaccaattggaccaccaccgaacccggcagaaaacatttcctcaccagaccagaatatttccgtccacaaaatggtgcaccatcgtcaccgccaccattcatcgtcaccatctgcattatatttattcattttcaacgaacgactcggcccattcaccacctcccgggtgatgcattttcataccccattcaacgaacactgcaaaacttccctccccatttttttctcactcaaattgcatgcatctcatcaaactcgcacacgctcatag

SEQ ID NO: 616 - DNA, 1052 bp, Aedes aegypti
tatcgacaaacctccgaccaacaaacagttcaaaattggacaattattacgcgaatggggcagcggcagaagtgtggcacggtgcggaaccattagatcgtctcgaactcgggatcagtggagtgatcatcaaggggaaccaaaaaaatgagcctgaaaacgagagggatcgtgtttgccacctttttcggcagctgtctgatcgtgggcctactagtggcggcactaaccaccgacaactgggtccaggccagccccaagcggtacaactcgagcgaatcgcaaggacgaatccatttcgggctgttcggagggcagaagcatctgaacgtggcgtacggctggcggaggcacgacgtagatgtgcttgcggtactccaggatgaacccgatgtcatgagctactggctatggcttggaacggccatcggtaccgggctgggcgcactaggcggcgcagtcagtgccgtagcttccgtactgaaatcctcatccgcctcgaagaaatccggcaccatggtggtcctatttgcagccaacatcctctcgggactctcccagattctgtcattcgtctgctggatgctccagttcctccaatatctcactcataacgttctggtggcggaggatcgcgacaacaattggtacagcagtgggctggcctcgctcagtaccagtttctatctggtagtggccggaatcgtgatcgtgataatcaacatcactctgctgattgtggccaccagcatggaaaaacgcgaacggaatcgggtgctggaggtcccgaccgacgagaaaacgcaaggagcgatcatgctttactgagcaaaggagtagtttttgaactcatcgttgaacaattttgaaatttagaaagtaattttctacgaactcatcgccgaagtaactcaagttagccatacgttggaactaaagatgaaacaaatcattttttttaatctataatttaatgcctaggttaaggacaacgcgtcgaattgccaatcgtgaaatcgaacttgtaattttatttttgaattaaaattcgt

SEQ ID NO: 617 - DNA, 2477 bp, Aedes aegypti
gcctatcgaagacgtcggagtaggaaaaccgcgacgcgtcaacagagagagaatatcatccccggttatagaggttacagctggtgtggtagtggcggtttatgctggtgtgcgagcgtaggatagaaagaagttgttccaacgggagatccagtacggaaccaagaagaaacacgatcgcggagtgatccaaattccccgttttgctagcaagttctgttattatcatcgggcgaaatccgttcgattggttcgaatgaattggagtttgacacctttgatccgggagtgttaagggaatgttaacagctcaaaccaagtgaagattttgaagcacttgttggaagtgaagttttgcggtggtttgaaggcagaagtgtagggcagtgagatccgtagagttttgaatagcatattttctgtgaaaacgtagccaatgatcgccagcgagtgtgcccaaataacctgattccggtgaagatcgtagtgcctcctagagaacgtccagcagtgtgcgaggtatttctggaagacgaaggctcccagcagcgagagatcgtgtccgtgtgtggtggtgtagttgtagagaaagtaccctagaaaatccgaagacgaagacaacgactgcgaagtagccaagatgccctgcagtgcagtaacgctgtctctcgcgacgatatccgccatcattgccgttgccctgctggcaatcgccttctccacagacaattggctgagctacgaagtgaagcggaataacatacagacatttatagcgaaacatccggatggagcgtcactcaccgaatcgttcaacaacaggctcgtctactacacccggacgcgtggtttgttccggtactgctacccgaaggagaaacccccagcgtcatctgttcaaatctatctctccccggtagagacccactgttccaacattgactacttccctcagaccgaggaagacaagtcgtcgccaggcttcaacgaggacatcatggctcgtctacatctggcccgttccgtcattgccgccttcattctcagcttcgttgccatcttctgtgccttctggaccgggctgtccggctgctggaagcgatcagccggtgccatcacggccacagcgattctgatgctgacggcctgcttgctcgcagccggtgccatgggactgtggcatacggtggagttcttcgagaaggaaaaggtcgtcggcgatgactactaccagagctggaccacggttctccgtgacaacacccgcatctcgtacgattggtcctacatcgtggcctgggccggcgtagcatccagcttgctggcgtcgatcttgctgtccggagcggccgtatgcctccggggcgaacgcgaaaaggaagaacaactgaacctgcaatacctgatgccagtgtatcctcaaaagcagcccccctacccctatggtggtttccctcagcctcagctctacccgcagccatactatcacggatcgcagtacggaccgtacaactactaagcgcacatatatatttttttcgttagagaaaaaaacaaaaatcacacaaaacattacaaatgcaatttttggataataacgtaaccgtcgacttttgtccgttttgattaggagtctagaaatttcgtttgaaatcgtaaccgaacaaattaagaaatcggaacagtcgcttgcataccgcagcaatctaatccgagaaatagcgtaaaatctcctcgaatcgcgcgccctctattttaacatcagatttaaaaaatccatcctctcgcttccagtttccgcttttgttctatcgcatctgtagaataactctgagagacgttactagccccaattcccatttatttttgaagaagacgagagcaatcgaattttactcgaaatgagctgcagcgcgaactaggaaaacgtctactccctcaatccagactgctcctatggtcttccattttattttaaactatattctttatgtaaaatgtgtgtttgaatggcagagttggtatccgtgtcggaaaaaaagacggagatttaaaaccttctcataagcctttccctccgtttccccactcggatttcgaatttcactctcattaacacgtttttatctttgcaaatattatacacgtgaaagccggtgtcattcttatcatactctatccttctttcttcgagtgtgtgtgaaaccattctactgtttccggtattacttttttgtttaattttatgtcaactatttttaagcttagaatgacatttgctatttttgttttaagtaagcaaaagaattcgacgttagaagcaagacagaagtgtaagctcttggagaagatatttttgttttccgagaaacaagcaaattccaacggcaggtgaagtgaacaatgcgtaatgctgttttgtattatgtatagaagaagataatttaatactacgttgtaaggaaaagaaaaatgaa

SEQ ID NO: 618 - DNA, 3773 bp, Aedes aegypti
ctggccgggcgggcagctgtcatcgtctttttcttcgcgtcgttgtttgcttttccccatcatcatctttcatcagtcgcggttttagtgttgtatgagtgtgacagtagtcacgacagaaaaagtgaaaatttttctttactgcactcggaaaatatgcactaaattgtgcaatttttccgttccgttcttgtgcgaaaccgagtgcattatggtgcgatagcttcggcccggctaggcgtgtgaaatagtcgtgaaattgtgtgcactagttagaacggtgaagtgttccggaggaaaaaaaaagatccgcggaggagttttcccccagagcgagaagtgcgaatcaaaaggaaaaaaaaacgtatcattgaccccttcccgtctcggtaccattttccgttttgtgggagccctaagaggaggagcagcaggaggaaaggttgtccgcggaatcgccgatatttggactaggaaaagctttaaaaaggagaacaggacgataattgtccaaaacactccacgcggtaggattcgataccgaacatggaatcagctgaacccgatgccccgcaggcatctacttcggcggcaacaatggccccgtcaacctccagtggtggccgaaagcgtaagctttccgccgacgaatgcaccagtgagcagccgaacatgaagatcctctcggttgagctgtccgacattgagctgcaggtatcgctgatggacctcagcgacgaaattctcatggaaatcttcctcaatctggatagcaacagtttggtcgccctgtccgagtgctgtctgcgtctaaacaatctggtcaaggacaagaagctctgggtttcggccgatttcagctcgtcccggttgggcacccaggaactgcaacgaaaaatcaaacacctacaggcggaaacccgttcgctcaagatacgaggcctgaccagtttgtatccgctggataagtggaaaaccccgacgctaacggcgaatctgctcatgtggatcaacaagtactgtccgcagttggaacacttcgagatcaacgagggctattttgataccaacaacatggccatcatttcgtttcctccgagcatacgaaccttggtgttccggaaatgcgaggcggaccggtcgatggcgtccgaaattaggatgggtttcctttcgaagatcgatagaactttgcaaaagttggaagaattaacgatagaatactgcagttggttcgacacgcacgattttatggcactgtccaaggtgccacatttgcgctatctgagtttgcgtggttgcgccaatatgaaggatagtgtcccgtacgctagcattgcaactcgatttggttttaagaaattacaggttttagatcttcgcgacacccccatatcggattccgacgtgagctgcttcaacatagttcaatcgctgaaggagctcttgctggaatgtccggagtaccttcggaccgaacgtggtttgaatgagtacaacgaagccgaacggcagcgcgtggaacagttgcgaagaatagccaatcaggacattatcaatatccgctatcagccgggcccggatgtggccgccaaccagcaggacaatgctcaacaagcggaagagaatgtagcggaaccggttccgccgccgcgtccccccaggccacatttcctaggcgagggccgaaacgtgttccgtttcgtcaatcgacatttcttcccgaacttgtacgaaaatgcaggcgagaatctaattcgtttcataaaccgtgccgagttggatcctgccgctgccggagggaatcaaccagatcagcaacaaccacagccaaacaacaataatgaagccccagcggcggcagctcctccggcaggcaacgaagaaccagcacgaccaccgcctcctgtcgccccactgcccccagtgccggagaatccggaaattcgccaacgtcatgtgcgaatcgtgtacaacagacacaacatcatccggatcgtgaaccatccggagcggaacaataacgtagagaataacaacaatgagcagcagcaacagaatcagcaaccgattgggcgacttccggttgaggtagcttatcagcaaatcttcgaagcaggcaatagggatcgtgtagaaaatggaccagttgcagtcgcggcagcggccccacaagccgaagggcctgcccaagcggaaccaagaccagtagtagcaccagcagcagtaatagtagcaaatgggccagtgccggaagcggaagacaatgccaatggaaacgagaaccaaaacggtgagaatggggaacgacttgcaccggctgcggcggcgcctgaagcgagagaaccgcctccactacagccacaggaagatgtcaatgttcgtgtcattctgcatggggccatacagaacaaccaaccgaggatgatgccacacgtgatcatcgtccgaggggagaacaatcccgcaggaggagcaggtgaggcagccgataacaatcagcaacgaccggcgaacgcattctaccagtatcttaacctaggtccaggcgctcccggaccgaactacgtctcgctggtcagcgatcgcggcgtttgcgcgtacggcgtttcacggcacgaactggccggggcggccttcatccgcgagtacttccggccgaacaacaccagcctggagcgactgttcgtgcggaactacaaactggttaccgatacctcgttggaccacctcgaatcggcagcaccgcacctgaagctactggacgtcaccggcacctcggtcacggcgcagggcgtccgtaggttccacctggctcgacctaactgtaccatactttcggactttgaatagactctagtgtgttaacttagattgtaaaacgtgaaagcagcagggtaggacactgtgcgtattcgttttagagaagacaatttatattgatctgaaccccctattgaaaaattatttaaaagtgaattttatggactaagttattggattcaaaaaaggaagtgaaatttccggacaaatgaccgtattcaaaatttacttttaagcaaactacaaatcatttttatgactataggaagaacattttttattttaactatattttttattttacaaaaaaatccaacttatacatgaaatacgccactaaattatcctagaatcattacaatgattgaaaaataaatgtgcagtatttaaagaaaccgcccaggcgttgaactttgtccttattcttcgaaaatcttaaaatgtaaacctctgcctcctacttcttggcatacctggccgcggcagcatcggacgccgccacaaacgtccgcttcagtttggtttcgcgcgactgccggtactcggccgccacgtccttggacagttccgcaatcagggtcatcgtctccgccggatagcgacagcccagaaactccacgttggtgaaaacctgcgccaggcaaaccagctcgtcctcgctgaagcggtccttgtgccgttccatgaacatacggcgcagttcccagtgttcgtcgcactcgtagaaggtcttgtacttgctcacgtcgaagctggttccggcggccatatcgaggtggatcgtttctggtggatgttcctgtactctagatgactgcttctagctggtggcgcctttttacggtagttgttctgggcttgaacaggaaccggagaatgcggaactattccgaggcctagcgggttgtgtacgatttcacggactgacagatgaagacatcattaacgag

SEQ ID NO: 619 - DNA, 1961 bp, Aedes aegypti
tgaaatctggcatgtttactttgtgttatagaacttacaaatgaacatggtatttggattaagaaaaagtttcaagtcaagaaaaatctgtcaccctttaggttgaattgatcattctcgtacgcgtaaaccggcgacgacgtcgcatctcctgaagcttcgtttgatccgcgagacgcaccacagccgcgcactgctgctgtttcctcttttctgcacaacctgcgacgcttcttggccaattagatataaataagaccactgtcataagcaactgccgtagtcccaaacgtagccacagcctagaacgatcgcgccatcgtgtggcgatatccgtgtccgaccggtggagtaatacctagtagtgggcgaagtgcttctagtatccgcttacctgagcatccgagcattacggatgtgcaaggtggttcctacgagaaggtgtgaaatctgatcagatcatctggggttgcttgaaaaaaggtgatccgtgaaaagaagagcgaaaactgttctcgcactgctgctgctgcgtggatcacgttggcggaagaacaaacagactgaagtgataatagctggcgttaggttgtgtaatcgataagatcggggaagaactgaaagtgaaatttattgctgcttgaaagccataaccaatcgacgaagatgaatatcgccgccttaatatttgttgccctggtggcagcttcacaagctcaacaattcaacggttactactacccaaagcccagctgcgactttggtgtaccgcaaacagtgtatgttacccgaactctaaccgattaccaaacccgtaccgaaaccgttccaggaggaatccaatatgatgagcaaaccatcacccaatactcgtcgatctacataacatcggcctacacacaaactgttccgatttatcaaaccttgactagaactaacaccttcactgtaacagcccctccaccacccccacgtgtacaatatagcactatcacgcttcctccggtcgtctcgacttacacttcaacttacattcaagctactcctgtttatcagaccatccgagacgttagtaccgtcaccctaccacctcaaattttacccgcacaaacctactatgacaccgtatcaatccctccagttaccagaacctcaaccgttgttcgtactagcaccgttccagttgtacaaactgtgcgtgacgttgttactgtagctgctcctccagtaactcttccccctcaagttgtctactccactgtacagttgcctcctcaatatctcacttctactcagtacatcacctcaacgaaaccggtagtccagaccatccgtgagacaattacccgacctgccgtcactcttccaggacaaacctactataatactatcactcagcctccagtcaccgttgtttccaccgtagtaaataccgttcctacccccgtctaccgcaccatcactaacacccaaacagtcactctgccaccaccacctccacaataccaaaccatctattccactgtaactctccctggtcaagatcaaaccattacaaactaccgtacgaccaccctccgagatgtccagtacctcacccgaaccgtaacaagcactcttcctggagtgcagtacgatgcacagaccatttattccactgtgacgctcccagctgtcacaaagaccttctgtggaccggaaaatacgtatcttcccgcagcaaacgacaacaccatcagcaaaagtggatttggaggtttcaataggcagtacaaccgtttcttctaaattagatgatagcgacttaggatgctgtaaataaaatactctttgtaaactgccagtagaccagaacggaaagaaaaactctaaatgtaaataagtgcatgaggaatttggacaatttcaaattgcaaacgaactaagatagtatacgaataaataaatgaattgagcgaaaa

SEQ ID NO: 620 - DNA, 2031 bp, Aedes aegypti
atggccacacgaaaacgatccggttccggttccaagcgcccgaaggaaaaggtcgtttacatctacgagcttttgctgcacggagcaaacgcggatcaaaacaaacagaacttctgggacgagtttttcttgcttcagccaaacacggaagccttcgagtcagagctgcaaaaattggattcgtcgaagctttgtgcggccaaatcaaaccttctgcttctgctggagaaatgtgtggatattatggacgtgaatgatgtgaaaagaactcacaatgccctgattacgcttagcatccttacttatacgatgtttaaaaagtacagcaattccgaagatggaagcgtcgaaaatatgtttgccgagtttcgactttgcgacgtggaagaacatatcaaaaagttggtggagaaaatcaaggaactgatcatctgcgataactcggacacgttgcggttctactgcctcaagctgctgtttattgtcggttccgggacggacaatttggacgataatctgctgctcgagtacatcatgtcgaacaatttgttcgactctctgaaaaaggttctgagcgattcgacggcacggctggaacacggacacgatatcgtgattctgttggcacttttggttaactaccgaaagcatgatgctacaaatccatacgttgtaaaattgtctctgctggacgacgaacttgcgcttcacggctttggacacgtgatatctgccacattgttcgaattcattaaacaacaaactacaaacgtactagcagtacaaaacaactcttggataagttcgctatcctcgatggtaggaaacatgttcctctctgacgaagtggacgaaaagatgtatcaaatcagacaaaataatgccttgctgttagcactgtacgaagcagtgcatttgaacagaaactttatcactacattggccaccactcaagcagagtcaagttcgccgccctcgccgtcaaacaccctcaatagtcatcattccatcagcgacctctcgtcggcgcctatcatcgacgtgacgcagtatccaacgaatttactagtggccgtatttcagtactgctcggttgttatgatggatcataagaacgaatcgagtgccgtaaatctgaagctgtgtttcataatcctaacatgcatatcggaggatcaatatgccaattcgatgatgcatgactcgaacctgacattcaagatattcctccacagagcacacatgcgccatagaaaagcgaccactgaccgagcctcgcggccacaaccactagctgcaacattattagatttgcttgttgagtttattgtttcccactttatgaaaaagtttccaatggagttgtacttgctgtgcaccggaatcatacatcgcgtcatcgtctatcaaaagcgctgccgcgtacgacttatatatccttggaaggaactgtggacggccctaataagtctacttaagtttatcgtttatcaggaacaaacgttagttaaaaagtgtaacatatttcatctagctattcaggttgttaatatcttcaatctttttatcacatatggtgatacctttttggcaactaccagtagctacgatgagctgtattacgaactgaacagggaagagaaagtatttagtgagattcacgctatggttctacggtataccacgattgaagagtgcgaatacaaagaagatgtatttaagcttttgaattcgatggtgaatattttggcaatcatcaagcattttcagataaaaatcaaagagtggctatctgctgaatctttatccaccccaacggaggagcaaatattggcccaaatacagaaaaactacgatctaaccttgaagctgcaggactccttggagtttttcgaaaggtacacggaaaaaccacatgatctatttttccgaaatttggtaaaggatgtagtcattgatactcgaaaatcagtgtatagcgtgataaagaactataacgccaacaaatcaaaagaaatttacgaacaataa

SEQ ID NO: 621 - DNA, 2148 bp, Aedes aegypti
ttttttttcttcggtaagctgtcaaacgcgttaaagttggagagaaacgaacaaaaacaacactatttttgatttattatggaccgaaaagtgaaaatttagccaactaccgtcgaaaattgaagaaatcgtgcgtcaactcggatacggtaattttcaccgttgtagttcaactagtggaaaacatgttcgtgtgctgaaccagcaggaaaaactacttgtggaaaagtgctcaacttgtactcaaccaactcaatccacaaaaagggaagtggaaaaaaaaatcaacatgtctgtggtttgatgtagttttgtgggatttttttcacaatcgggacaatcgtaacttattttgaaacaaacggcgtaattccgtcccgattgtttgtggaaaaccagggtgttgcaacaacgtttttgttcggctacgttcacacaatagggttctaaaggttaacgatgagcaactctgccggaggatttcgaggtcccggtagtgccgggagtggccgaccggagcctagtaagcgtttctcgattcacgatgccttcgaggaggaaacggacgaggtcatcaaagtgtacggatcgactgtgatatcgacgcctatgcgggccaaggccagatctccggacgatgtgtccatccgggtgcaccacgaccaaagggacagtgactcgctgatacaggaatacggcaacctgtcgtccaacgacacctacacctactgctggcgccacccgaaggttcgggaaaattggcgaaccgtcctggcggcagccaccctactagtcatcggaaccggcctgatagccatgggggcgtacgccatcgccgaaccacacaacggatcccaggcagcagtcttcttcgtagcgggattcatctgttttgtgcccggagcataccacgtggtgtacatctggttggctgcccggggctaccggggattcgacttctaccatttgcctttgttcacgtaagatcaattctaatggctaggaaatgtgctcgaaattatacgaaatagacaagtttgctcatgaatccttccctggggagaaggatccgtagaagggcttgaaagaacactagatagttcgacggtaggtaactcgactagacgagatgtgattaaattataagttatttaggtaccttttatttctttactgttttaatacactgttagagttacgctgctatatacactgtcctttgtatagtcacttttataactaaatatatgggataattttataaccaccccaactaaataaaactaaatcgaattggcgattttttgaccacttttaaatgaattctattgttttgattaaaactaggcgatgaaaaattgaagaagtgttcattattgctcgattgaatagtcgttaccttgttacatcttccgaatgaacggaaaagatctttgaaccaggtaatagatcttcctttgcgagagagtttgtcttcttatattgtcatatacgccaggtctggcagcagggttctttttagatacttgatatctattttattgctagtcccaaaaaaaatcattattttcaatggaaggtcttaaatacctaattaggaatatttacaggggttacttcaaaaattttccaaaatgcctttccagaattgccttcaaaattgtttccaccaattccagtttccacagtttttccagtaattacttaagcagatcttcacatttctacaagactccttcggagaaaatacccccttcaatttttgttgtaaaaattcttttaatgtatttccaggaactctttcaagtattgctcaagaagtttctacgtcgatttttagttagttctccggccatttatcaaggttgagaaacagaactctaaataacattcataaacggaaattgcctcaaaattcttgcagagattacaccaggaaatgtattaggatctcttctagatattcttccacgatggcgtttacagtttttttttcttataaacaatactcgagtaattttaaaggcaaagggttcatggattcttcataattttatttgaggtttcacatcagtgaatactaaagaaattattccgatcatttctaaaagtttctgcagggattctgttcaatgttttttttttcaa

SEQ ID NO: 622 - DNA, 960 bp, Aedes aegypti
atggtgcagcagaagggacgtgaagatgatcgtatgagctgctgcagtgaagatagtgaactttcagtaggtcaggaaggactggaagaaagcgataaaactatgaacagtgatgaaaaacttagtgtaaggcataatgtagaaatgggtgaagaaatgagtaatgattcttcacggtattcaagttccaaggatccgtcggaggattacatgaagattccactgatgcgaccaagcccaacgcgattgcatgaagagttccttagaaattctcaactgtatgctgaagagcttatgcggcaacagatgcagattgtcgctgctgcgagaggtctcaatttaagcccaaaacctttggaccctggcctcggactgacaacgtcgttccgaggcattcattcacatttgagcgccatctcacaaataactcagaatctcaacagtgacattagtaagctaacctcccccgcaagcctagccagtatggcctctcgggaaaattcacaatcaccaccgcaacatcccgctcatctgctacaaatcaacaacaacattgccctcaacgatcaaaacctcaagttcagcatagacaacatattgaaggccgatttcggccgacggatcacagatccgctgaaacgtagtggcaaaagttttgcgaaaaagccgtcggctccaggcgaaaagtctaccgcgatggatctgacggcaatcgttaccaatggcagtgcaggcaacagtgcaagtgccagtagcagtgttgccagcagaagcctaagttcaagtgctagtggaagtgaattggaagtgcccacgtcaccgtcgtcctctagcggtaagacggctgcggaaacgagcagcagtagtggaagcggtggaagcagttcgtcatcatccggagggccaatggtctggccagcctgggtctactgtacccgatacagcgatcgtcctagttca

SEQ ID NO: 623 - DNA, 855 bp, Aedes aegypti
agaagccatcgcgctaaacacttttgttaactctctgaagaagtagttctaatcggcagagatcaacgtcatcggcgtcattatcaccaaagatactgtctaagtcgcatacgccagtgaaaaagtccgcttaaccacgcgcttcgagataaaaggcgataatttaatctataaataataatcggaacgatgcagtgcaattggaagccaacaacaggccaccatttattgacttaaaacttttggattacaaatcttttacaaacaataggtcgtgccagttgagccgtggacatgcgaaagtgaataaacattgtgcgttgacctcatcctatataattgagatttcctgcttagagaactgtaaccatcgtcataccggttcaaatcatgcatcatccggagcagaaacagaacaacgacgaagtgctggtagtgaagcatgttcccgggacggccgagttggacactaggtacgatgtgctgctgctgtgcggattcattctgacggtgatagtggtgggcatgatcttgcggttggccttacaagtcacccgagcacggttaattaccaccacccggtcgaatcaagacgaaaccgccagctcggatggctcagtgctcagtttagtgctcagaagatgaaatgtaattagcgattgagaccgttttataacatacctatctacatagatacgctcgtccgcatgtcgtgagtgagtgatacattttttaatacgatcacgttcaatgtgataccggcgtgatgtgttcgaatgtgacacacataatcttaagaatttctaatcgtaaaacgttcatctcaatgaaaataaagaatgtgtgataaattat

SEQ ID NO: 624 - DNA, 1469 bp, Aedes aegypti
gacaggatcatacaacgtgctgcgacgacgcacggtgttactaaactctcgagttgtgattagtaaagttttagtgtgattgatttcataagtgataaaagacgcgagtgccattctagtgggcggatactagcctagtcgcgaatatgattaaagtaaccaaagcaaccggggcatacgcggccctggtttccgtcgtgtctgggaccatcgtatggttcaacttccgaccgttgggaatattcttcttctccggattggtggtgttttggtgtcggcagtacgccaatctccgcctacagatgaccccgctggtggaggacaagcttcgacatctgggccgccgggtgctggaattccgcaataaaaggcctggcctgttctgtgcgctcatatcgggcttcctggttgtggtggccgttctcgttcacgtggtttccggggcgtacatcgtggtgacgctgctggtgctgtccatcgtggtttccaccaagtatgacatcaaaatcgttgtcgatcgtgaacaaacatcaaccccactatcggcaagtctcctggaccaagaggtggcagaattcctcccagagatcaacgaggccagtgcatcgctcctgaaacaggtcggtgaggaagcggacgtcagcgccgtctacaagacggacagcaccatcagcgagcgcaaggcaacgggcgacgacgacgatgacgacgatacctattcggatctgctgattccgcagaacagtattaaggaattggacgaagccgaggaagaggagcaatccaacgcgtccagcagcgacgagttgttgctcggcggtggcgatctgccaagccactccggtgagattagatttaagagtggccatttcaatgccaacacttcctccgattcggacgatagcatctcgcgaggtttgagcttcgacgacgtacccgacaatgcgggtagtaaaaaacgaagctaccatcatccgcagcagccacagtatcaactgttggagcagcggtcccaacaaccggtgcagcaggatcaactggccagtctggcgggaagtttgctatcgggcggtgtgcttagctaccttacctctgccatggccagcgcttcggcaatgagccagtcccatccggctccgagcctcaccaggcaccccaatcggatgacggtttcctcggcaagtggcgacaggcgaacgttcgccggagattcaaccgacgaagacgaggatagcgactttgaaatgctgaacccggacgagctgaacaatgtgtaaaagacgcgctcggaaatgcaaggtactttccggtgggatattcgtatgtgatcgattttggtttttgtggggcagtgatctgatattttgataccgttttgggggataattttttagtttattttgttattgatggatacagtatgattttgaactagatttgacgatattacatatcttcgaaattgttca

SEQ ID NO: 625 - DNA, 408 bp, Aedes aegypti
aaacggtacgattttgccccggaaaacggttccggaacgggttctgggcggtgccgatcgattccacccccggaaggacggattcgagtgccaggcggacgtgaaaatcgtgccggaagtgtcgatccgtgtgaagagtgtcggtcgcctactagaaggcaatcgaaatcgaatctcgaatcgaccgcggagtgtgtgtgtgtgttttgtgtagttgcagaaaatcttcccatccataatcaatccaagacggcggcggaggagcgttttcttgttccgattcccatcaagcctgtccgcggtttggaagttggaagaagaggaagaaccaagggaagaggttgcagtggaaaaaagagttttttggaaaaagattcgtgtgtcgtactagaaaaaaatgttaattga

SEQ ID NO: 626 - DNA, 1756 bp, Aedes aegypti
atgatgcccacgattctcgcgcttagcttgtccttgtgcgaggggaaaacgcaggcaggccaacgccagtggggtatgttttccacggaaccgcacgctttgaccaacaacaacagcatctgggatgctggggggttgataagcgagagcttcaccacaacgtgtttccatagcaatacgaagttgggcaccgggagagttgttttacagattcatgtggagattgcgagaataatgccattcgccgttgttcaaacaactaacgcacggggttgcaatgagctgtcggtagtacctgcgtcgtggctgcggggatcaaggagcggaaacattctgctgtggccaaatgtgaagagtgtcgcagaacaggaaagattactccgcgacgaaaacagctccccgaagaagtcctgggtgaaatataaatgcaaggtgaaacggaatcccatcgcatcatttaatgccgcgaagcgtatgctggatgatttatccggagaatcctcatcggaagtcagcaatctagttcgacgtaaacgaaaacccaaaaacaatgaggctaataactttcaagaaatgctcattttaaacgatacgccttgctcatctgctgcagaaacaacctcgtcatcggttcccattgtcattgaggtaagaggaggggttcaaggcgagattcaggatgaatttcctcgaggaacaacatcttcccctcgacaaccacccgccaccgttttgacaaacgttgaggataatgttcaaaatgcccaggatgaaatcctccaacagccactacctgtacttccagtcaatggcatcacgacgctgtctgaagataatgtcccggaaattcagactgttcagtatgtggcgtacgatactgcagatactgtggtggagccgggaacgcaacagtgttttgatacggttatcaaacaactgcaagaaacaaacagcagactggaacgactggagaagcgtatagcaagtattgggactcaaaacgaatttatgttagacgcggtccgaaagttcatctcccatacgacgaacatcgaacagccatcgtctttctgtttcgaccctatcaaagatgagaatgaattggctgatttggaaaataagctgacggacaacgacttcaagttgaagatgattaattggttgcggttgaatgtcagtggcgactgtgcggataatcgcatgcttggagtactcgatttgttattcagcaaggaattccaaacgaaatgcacgtggactggagccagtcgtaaaggaccaaaaactgctataatgccaaatcgacatgttctgcaattatttcagcaagttggaactgatgagtctgaaacggtaactcaacataaactggccagctttttcatgaaaaagctaaaaaattctctcaaacgattactcacaaccggcatgcgtcgtgggacaaggcatgtgagacggcgaaagcagcaatgtgctactaaagatggtatgaaactcgagccagagttcacacctgaagatcatgaggagaatcacagtgatcatgagtccgatgaacatgtttcttcggtcgttgattcgtctgatgccattgaagctgtagatatcgagtcagactggaacgatccagcttttgatgattccagtgaataacatcttgcaacgttgtacttgattaggagccgactgataatgtatctgaagagatattgtaggggagctaggggcaaaataacacatagtaaccaattataac

SEQ ID NO: 627 - DNA, 576 bp, Aedes aegypti
ttgttccacttttcgtttcaggacgtcgactacgagggtttccgtaagtttctggacgcgttcctcgactgcgaaacgccggaggaactgacgcggcacctgttcatatcattcctgaagccggccctgtatcaggcccagcacagcagccatggcaaggcgctcagccagatggcggcgatcagcagtaatgccgcctgcgcgccggtcacgtctcacaatcgagggtcgattcccaaccttaacaacattatcgacctgcccactccgcagccttcgcaggaatcgcagcgcaacagtttcgtcgatcggatacagcacggcatcgcggacaagcttcaatcgctgggccacttgggacatggcgacaccagcgatgggagcaggcaggggaaaagcgtgcacccgatgttgacggttacgccgagcccgatgggaggcagcacctcgattctgccggcaccgttccgaaggtcggccgattcgagtccatcgcacagccacagtcacagccactcgcagatttcccggaactcgtcccgcaagagcaacaattccgtcaactgtcggatagaa

SEQ ID NO: 628 - DNA, 1035 bp, Aedes aegypti
attgtgaagtttaaaaaatatattgaaacactcaccacgaaaatactggagcctatcttttaccttctgtaccggtatcgcttgaaatggaaccacaactggaaaatattgttgtgaaattgacagcggaaacctcgcttgtagctgaattcccactctcgatttacgattttaaacgcaatgtcctcgtaaggtggccccgcgtgaaaccgcagcgttgcaaagtccggattgtccgagcaaggtgtcaggaaatattgtggcgtagaattcttattgatcaaatccggatagaaaatattgaacttgtatccctgaacgattttcggaggaggattatccatatcgtagtgagtttggttatacttgttccattcgaagccagtgtggacacgattgaagtaacgcggcttcctaggacgatacttgtcagaccacaagtagacttgcgaatcgactcgggattcgacggaaaattccgcttcatcatcgttcattcctcgttttgcttccttgcggaggataagttcgtccttcgaaaaagtttcatcctcctgattgattcccaacactttctgtcgaagaagatccaacacttcgtcgtctttttcctcggacactatctccactcccgcttccaggtcactctcagaaacgtattttggctcataaccaccttttctgtacaattcgaagcattcattgagcagatctgattcgtgactttcctcatctttagcttgttcagtgccggattgactgctgctatctctggaggtttcatccattgcctccagttttcgcaatccggaaggacctgctccgcttggccctgcctcggaatcatcatcttcttccttctttacgcttgactcttgctcctttttaagcatttccagtttattacggagattttcttgatgacgatcgcgcaatctagcacgagccatatgagccttcagctgcgatagcaagctttcccagtaaccaatatccaacccatcctgttggctattgattttgtcctcaattttc

SEQ ID NO: 629 - DNA, 1569 bp, Aedes aegypti
ccctctcgctgctggctctgctagactcccgtgatccttatccctcgatgtcggactacttcccgctcgtgccagccaacggaccgaacgacgtcctaccctatccgcccaactccgtctaccaggaaattcctctctcgctggcgttggcgcaactaggtgaagcttccagaaatacggcacggttggcaccctacagcgatgacgagggcgagtggatgaacacgtggacccagcctgccgtcgactatctgggcttcccgacggacgttgacacactttcccggctggaaaatctcgacacgaaacccaccaagaacggattctcccatcagaagcgattcatgatcacgaagaagaaacgcagcgtgagcctggacgacgatgacgactgcaagaacgacggcaagaaaacctgtctgctgcgaaaatatagtcaattggcagccaccaaagtcgccccagcctagacagcaactggacccattggcaaactctactcggacacgagacactgagtgtgtaaatatacggaaaattgaaaaagcaaatatatacatgaaatactgcagcctttggaaagtcagtcgaaggggtactttggctctgtagaatatactgtcggagttgtgtcacccctcagacggctgcctcagattgcactacgggatggaatcaacggcaaccagcatcgcatcaacggaaactggataatgaatttatcaatatcattattattgtgaagatacggatagcagaaattgtttccttgtattttcgtttaaaaattcataaacatacattgggaatggaataacataacattgaaggaataaaagaaatgtaattatcatgatcccatatacatatttaatctctttcggatataacaaatcaaacactgtcccgtttcgatgttgttcaaaatttgtaaatgtatcgtaaaatatatcatatggctaccattgcaaatgaaaacaaatatcagacattttataacatggaaatccatgtatattcagagttctaccaattgacatcataattactcaatttagcaattaaatataaacatcactatgacaaaatgcgataagattgcggttcagaggtaaaaattttaattactagataaatgaaagctacattatataaccccaagcaaatgacaagtaaatatctatcgtataatgatgctgatcgttcaaaatccacaataaacatttattacccaaacgatgtcaacaggcacaatagaaaagtaaatcaattgaatcgtgattatttctacattcaaatcaagcagttttatacccttaagttaccaaataccaccattatgccacgtaatcgctgtttcgacaaaccatctgagaagcagatcgatgcactttgatcacgagtttcaaataaaatgcccttggttggaaaacaatcgccttgtgttaaatttcattgcaacaagagcctaatattcggaatgcgcaagataacatttcgcgtttggaaacaaacataagtgtgtgagtgtttaaatgtgccgttgttatgatcgggttcacaattata

SEQ ID NO: 630 - DNA, 1486 bp, Aedes aegypti
atggaagtacacgaaaaacgacgaacatttacgaactcgggaaccgccggaagtcgcgccggcagccatgactctgaagacaagggcccggaggagaaggaaaagcccaactttgccctatccggcaagctaaccgaagaggccaacaaggtcaacggcgtggtcatcaagtacgctgaaccgccggaatcgcgcaagccaaaacgccgctggcgtttgtaccccttcaaagggtaccaggccttgcccacgatgtacattcaccggcagagctgctacctgatcgggcgcgatcgcaaggtttgtgaccttccgatcgatcacccgtcctgctcgaagcagcacgccgccctccagtaccgcttggtgccgtacgagcgcgaggacggaacggccggcaagagggttcggccgtacattattgacctggaatcggccaacggcacattcgtaaataacaagaagatcgacaccaaaaagtacatcgagcttcttgagaaggacgtgctcaagtttggttttagctcgcgcgagtacgtgctgctgcatgagaacagtaaggaggacgaggaggacgatgatgtggtggatgagaagggtggcggcacagctcccagtaatggagcttcgggcaatgctcggagcaagcgggaaccaagcgagtgaaggcatgggatcagactcgagatttgaattttacttaaattgtagaccacatggaagatgaaaaagaagaagacgaaatcaacatagggaggaagcaagaagcatctcccattctaagcatattgtcagcaagaaattttagaagaagcgcccccactcgttactagtgtgtgtgtgtgtcactgtaatagataactaccaaccaatatcaagagaggaatccacaaataaaaagtattctaatcacatctaaacacgtccagtgcaaaatgtgggacccgatccaggccaggccgggtgccgtcgtcgaactatcgaagaaaggagcaggagaatgaatgcgttgttgtaagttgccgttttgacgacacgttccaaagtcgaaacctgtgatatgcgagcgagcgtttgaatgcgtattctcagtaatccacctttcctgcgggaagtatgcgaatcaaaactttcggcgaattgtatggtggcctgattcggtcgagggccagcaacgaactacctgaagtctgcggaaaaactgtcgtcgctggaaactccactatgtctacgaagcaacccgcacatgaactcgaccaaaattacatcctgaactctagatctacaagtaatcgctgcggaagatctggattagcaagaaacttgccgaactgaaccgtttaattcctctgtctagggtttgattatgttctgttggagccttcgataagctggacttggagaaggtcacccgaacaaagaggaagcccagctggaaagtccgagcaattgacgtgtaatcgcggaaaatccaatgacgcagaga

SEQ ID NO: 631 - DNA, 464 bp, Aedes aegypti
gctaatcagcaactacgacgacaatgaatgcaatgcaaatcagtttcctggtgatcgctgtcatggccgtcggagcctttgccgtgccgtttgatttcttccagctatccggatttgatgagtcaaacaaccagcagaatttcgaagatgctccaagcagcgttgaccagtcgcgggatgccccagttgaaccggaacgcgatatccgcattgaatttgaaccggaccaacaggaggaagtacggcggggagctgctatcgaagaagtgctgaaccgagacgatgccgcccaaaactcggcccatgaggattccagctcgtcggcggtgatgtccatcagtcagcgaagaattgctgtggactcagttcattagggatgagagatttatctcttataagtttttttttttaattttgggtcttgtagctttaggtaggtgagaataaacaatattatttggccc

SEQ ID NO: 632 - DNA, 1513 bp, Aedes aegypti
tccgatctgaaccgccaactgtccaagtggttggacgatgctgatttgactttcggcccggcccgtgcaattatcgccccgcacgccggctatcgttactgtggagcatgtggcgcttgggcttaccgacaaattagcccagctgttgtgaagcgcgtgttcatactgggtccatcgcatcacgtccgattatcgcgatgtgccctctcggcagcccagtactgtcgtacgccactgtacgacctcaaagtggaccaggaggtcaatgccgagctggaagcgaccggccacttcaagtggatggaccagaagacggacgaggacgagcacagcatcgagatgcatcttccctacgtggccaaagtgatggaagacttccgcgaccagttcaccatcgtgccaatcatggtcggctcgatcagcaacgactgggaggaaacgtacggcaaaatcctggcgccgtacctggccgatccgcagaatctcttcgtcatttcgtccgacttctgccactggggggcccgcttccggtacacctattacgaggactcgcacggtccgatctacaagtggatcgaggtgctggacaagatgggcatggacctgatcgaaacgctcaagccggaaagcttcggcgagtatctgcgaaagtacaacaacaccatctgcggccgacatccgatcggtgtgctgcttcagtccgtggaggagctgaagcgacgtggctaccggatgagcttcaaatttctcaagtacgaccaaagcaatcaatgttgtgataagaaggactccagcgttagctacgcctcgggttcgttgattttcgaatagaggtcgcacgcgctcctcagcgcccggcagttgaaaacactacaaatgtattgcataagttaggaagcacatcaatcggaacaaaagcagagtaacaaaagcgtaaggtaaaacaaaacagattgtttagagaagctaataacaataaatcggatcagagaggcacggatttaggattgcgagaaatgacactaaaaatgagagaaagctacggatcaagagacagaaagaaagagttttaatatatacaatttccgtcaaacgaactcatatgctgattaatatatgattatatttacttatatgtactgctagtgtgtgtaatccagcaaaataacaaaccgtgtttgtctcatcgtttttagcattagcatgtaagtgaagcagagaaccccttccttgatggtcgattttagaataacaaaataaaaagcctgtcctcaagagtttttattcggaagtttggaatgtagattagcagattgagttcaatgttatgtataggtttgtctctttccgttcattgttacgagaaacatattttccactcagagaagcgaaaaattactatgttttgcttcgatcacaggttcggccctgtgtaatattacaaaacccgcctgtactttgtatttcgaattagttgtttgagtgaatacaaatattcttaatggaaaataat

SEQ ID NO: 633 - DNA, 2431 bp, Aedes aegypti
atgtcactgcaggtgcaatcaagtcagcaaccgacttccggtcgtcgcactccccagatctaccaaaatcttggtagcacaacccctgcgacaacgcctcccaccaacggcaacagtggcaaaagtgcgtccaaactgtccctcaaaagtggcaagcagagtccggtggtggttgagcataccacggagcctacgacacccaaggatgtccacaagacgaccacgaacgtggcggtagcggtcaccaagctggaaaagactcccacgggtgccgccagctctccctcgaaaactgacaagggaaaggaagagaaagacaaagcggccagcaatggagcctcaaatggtacccacagtgaaaaggaaactaacggcaaacaggaggaaacgcccaaagcagcttccgaaacacccaagaaagaccaagcggaaaaagtggccaaggaaagccctcgagccagtcctcgttccactccacagaagcaacaagcggagtcgattcccgtggagcaggtcaagacccctgaaagcacaagcaagaagacaaaggaatcgcctatggtaactccagtggctgccaaagttgacgaaccgaaggccaatgaaaaagcagtgaaggcatgtcccgccgaaggagacgagatggaatcgctggtcgttgaaccatccgaatatgaagattctcctatgccaccgcgtaccggaggcaaaactaagctgctcaaatattccggagcaccaccgactcgggcccgcatcagcccattccgtgttaaagaaactacagccaatgcaagcacgattgtaaacctcagtaccgtcagcgaaggacaagacagtggttcaaaagacacctcactggactcggactcgcagcaagtgcccgctttaggcgttcgtccgctacgtgcaatctccggacggcgtggaatgcgccccatcacggacattcagttcacctatcgcaaatccaccgaattgaatgattccgcatcgagtctgaacgtaaccgttggttcagagatccacaacgacagtctccgtacgccagctccgggttcgacgcgcaaacggaaggccatgactccagagtccacatccgatgcgctagacgtgaaggaaatcgttgacagtccgaagcgtactcgtttggacttcagcggtttcctcggaattgttgccagtcccgttactatgctcaagaaccgtctttcacgggtacggctccaatcgagcactccggttgccaagcgtagctttgacgaggaagatccaaccaagtgtgtccaagcggaagccacgaccactactgccaacatatccggagagggggccaagatggatgtagacccagctgcggatgcaacgaacgacaaggttgaggaagtggaaaaggctaagggcgacaccgagggacaaaccaccgatctgcctagcgaggaagacgcctcaaaggtggtggagggctccggggatgccagcgaatcaccggtcgaagtgaaggatgtctcaaacaagcgacagttttgtgttgttatgtaaatcaaattattgttttccccccttcttaaatccactctctcgcaacagtcttgctttatgtaccttggtccaacaattaccccattttttgcccacctgatcggggctgctatagctcttatgaaccgtttataaacgcggttcagttgaaagttttagcaaatattttttaaatcgaaagaacaaaatgttcttaacaataaaaaaataaaagatatttaagttttttttagtttgtctaaatctctttgattgctttcccccttttacgattccgaaccacaaattatctacttatcacgtttattttttatattatcaatatatgagatttgttataagtatttagagatatcccgtaaacgaaacttccatgaaggagaatccaaaaccaagttaaaattggaaacaacagagaagacgcgtgggaagaaatccttgataaggatgcaatttgagtagacatatgaataacaattgaaaacgtttgggagtagatgaatggaaaactcatttcttagttatagtaagaaacagataaaagacgctggtataaaaagcaacattgtgtcactaaatcctgtattcgtctcatgcgtctacattggtttgagaacaaatcggaacattaggcagcggtatagaaaagaatcatgagtcaaatatgggaaaagtaatcctgccctcattatcatgcaggcaatttgagaatactacctactcgtagattaaaataagataatcctcgatatgaatactagaaacactttcatagcgcaacattagacatgaaaatatcacccgtaatcgaaaaagagtaaaaatagataaaaaaaaactgtaaaacttaaaacaatcacaaaaatatggaataaattagttctaaaac

SEQ ID NO: 634 - DNA, 827 bp, Aedes aegypti
atggaggatgaacatccgcagcagcaccatcaccatcatccgtcagctcagctcacctcggacagcagtgcaccgctttcgtcaacggcaacgccttccagtgcgtacatcgtcggcaatcgtttcttcggaccggatttcaacatggaacagtacaaaggttacttctctctcgtagacatggccgcagacaacactgaccgttcgcctcgaaccccgaaaacaccttcggcacggtcagtcaactcagccgaagagaaggggcaccgcaagattctggagcagcgccgcaatttggttatgcaactgtttcaggaccacgggatgttcccaacgtcccaggcgaccaatagttttcaggtggcccacagcgacatctttcccagcaaacagagcttgcagctgaagatccgcgaagtccgacagaagttcatggctcaaccgcctggctttacgccacactcggccgggccgatcacgccgaccgatctcggtgccggtactcaaaacgatacggcgcaacaggaataaacagcaaagcaagaatccgtttgtcaatactttttacaaaagcatttcaaaagccgcttatcctcggtagcattaaactacatatttgcaaaatgcgtggcgaacctggaatgctttccgcagaactcatgctcccgctgatagaaacaaaaaaaaacaaatagataataattatttactattacaatcactactcaatagcctaaacaagatatactggaactaaaacaagcataaaaaaaaacaatagatgcaacaatttaaatctaactcacccatactttcacatagccgtt

SEQ ID NO: 635 - DNA, 373 bp, Aedes aegypti
atgaagacaattttgtgcataattgggctgatggtagtggtttgtgacctggcccaagctgaaccggaaccagttgctccggatacacggaaagcaagacatccgtctagtggacccacgagctacaactcaatccctggtcctgacagtgaaaccttgagtaagctgcagaatcaggttgctccttcggtacaaatcccgctcaagcctattggacctcctggaaaaacttctgaagcacctcaagcttataccgtaacgtctaaccaacccacaaatcctcacccgtcaacattcactgctcagaacatcgccgggcagtactatgttgcgatgacacctcaagccacaggaaaccaagtattgtctccag

SEQ ID NO: 636 - DNA, 7845 bp, Aedes aegypti; identical to SEQ ID NO: 305

SEQ ID NO: 637 - DNA, 4555 bp, Aedes aegypti
cttcagctagtttgtggcagacgtggtttggattcgggtgagatagttttgtctgtttcgtcaagccagtgaagaatgtactgagaagaaatcgttttatcagtgccccaagtagcaaaacttctatttttcgcttgttaatcggtcctgaaagtagtatttccgatcgacgtgttgcattttatggaaaaagtggatttttcatcgcggtaaagctaagtgctgatgaggtggacccggattgtgaagtcacttctcgggtgtgtacaaagataggcgtcatcgattgtattttccggttgtggttttactagatactggacgcactgccacatgtgagcgaacaatcccgaccaactcgaaaggtgttcatttctgcgagagtgaactgagtgaccagactaaacgcagtactagcccagacaaacagattccgtgtgcagttcgcctttactgctgctggtgtgacagacagaagctaacggagtgttggtggactcacaacgtaaaagtgtcaaaaacggccagaacacgagtcgctcggatttggatttgggttggctgcatcatcatcagcagcagagcagtgtgtgttgtccaattcgataacctgtgttggaagtgtgatagaaaagtccaattactacaggttttaaaacagtgccagtgaatgttcaaggtcttctgtggttgacacatcttcggtgctattccctgggggaaggtgtacaagtgtgagattcattgctttgcttgacctaaaaaagattaacttgtgaagccagcaagtgcaacaacaacaacagtagaaaacccgaagaaaatggcagatgtagatgatgtgataagtgaccaggagaagattcggatcgtgaatgacttcattctgcacgctcctccgggcgagttcaacgaggtgttcaacgatgtccgggagttgctgaacgacgaccggctgctgaaggagggggccagtgcggcctgtgcccagtacaacaaggatcagctaacgccggtcatcctcgagggctccgggctggccgtgctcgtcacagagttcaacgatctgggtggcggccgattcttcgacccccggaccaaacagagcttcaaattcgaccacctgcgcaaagaggccctcgacctgcagaaccacgagtgcgaccacatctcggaaccgtggcgctccatgctggacatcgaaacgctaacgtactgtgcgaaccactaccggaacggatcctgctcggtgtacgggcgcagtaacaacggacagatccagctgagcatctgcatcgaagatcaccagttccagccgaaaaacttctggaacggccggtggcgttcggtgtggtccatcagcttccccgcgtccggtggtggcacggccgagctcaagggcatgctgaagctgcaggtgcactactacgaggacggtaacgtgcagctggtgtcgtcgaaggagttccgcgaatcggtggtcatcacgaacgaagccgccactgccaaggagatcctgcgactggtcgaggagagcgaacacgactaccagacggcaatatcggagaactaccagacgatgtccgatacgacattcaaggcgctccgaaggcagctgcccgtgaccaggacgaaaatcgactggagtaagatagtgtcgtatagtatcggtaaggaactgaaaacgcagtagatttattaaggactttattactattattattattattttctatgcgagaatgggggatcgtgatgtatgcagggggatagaagaacaaagtctaggaaaacatacacaaacagacacgagcctgctcgcgccggtgggatatgtgcattcgggcacgaagagggggtcgcactcgtgtcctccagtaggtatcgcttgtcatagtctcgtcgtcccacgccaagcagacaggggttaatctagctaggagagaggttatgtgcaagctaacgaaacgacgcggaaggctaaacacaattattaataaatttaacaaattacttccgattggacggaagatcgcacgcaatcaagccaatattcgacgcagtaatatagagggaaaaaatgttgtatgttttatgattggatgcaagcgacatgaaattaaggtaaaatcggaggatttttgatcattcagagggttaacgtcacgttggttttaaataaaattcattcattatttatttcgctgtttcagaagtatgtttcactggacagtataagaatcggagtaatctttatacttgactgttggtttccgtttgattacaatctgttttcctgtcggctgaagatatcattggattggcattttagaattttcttaggtattactgaatatcttcaatgaggagagctcttggcgaaaccaaaataatctgaataagattcttcagacatagcaatatggaatggctgctctgatcttctgtgcctatgttttcaatacaattcaggtgtttgtcgttgtactgctcccacatttcaaccaaggtcgggatttattcaggtggcgcagatctttttccactgtcctgcaatgaatctgtaatgataggagcttttggcgaattctaagcaatctttatacagttagtcagccagaacagtgttggatggctgcccagatcttcgttacctatgttttcagtgcatttcaggtgtttgcccaagtactgcttccaccgttcaaccacctagcctagtcgttgagacattcttgttcttactctttaacatttcggcttgttaaaagacctacgttttcggcggttgtgttgtggcggaatccatagtcaaatcctttttcagtgtacaggaaatttgactcaattttgagtttgtgacacatacccaattatacacagaaatcaagttcctgaagtggaaatatgcaatccacgttactttcagtagttcaccactgtaattggtgactgtaaccatcttccaatgtgacgtccatcttttcaaaatgctcaaaaagcacaaaactaaaccataggataaacggattcggtccgcctaacaaacagattcaaaccagcgtaattcggtaatattttgttgaacgttgtcgtcatcaaaagatatacttttgtctataatagaactactgcgctgtaaatgcattgccgtaagctgtaaggatagtaaaagtaaaacatattgaaaattataaaagaacggaatataaagtaaaatcaattatagcatacatcaaaaactcgaattcaccgacgtttggcctgcaacatagaatcctagttaaagaaaaaaaaaaacactgaaaaacctccttttctattaggtagttaacgattctacacgaacactgacactcacacatacagctaaatcggtatccttgtagaaacatagaaattgaaccatttggtatcgtagagacgatacagtgatgatacttctatgcccattgatttatgattatagtccaggtaacaccaagcacttaacgcttcaaactatcgatgtagtgcttgtacagtgctaataagtaatttatcagttctatatgagtactatatgtccgatttagcgaaacttagcactccacttgaattgaaatcatgatggcaagatgatttgattgcagacagtgggactcagaactcacttgcgaggttcttgaaagtacgaaaatttttcgattaacttatgtatcacttctagacaatgtttgaagattctttgcgcttatagactggtaaatataaatgtctgaagcattcacgtgtataatactgcaaggtcccataatttcacattctagggtcaaatagaaatacacccctttcctcagtagtagaaagtggatgcccaatccaatcattaggctttttagaaccaccccgacatctagtattacattgaaaacttaaatactaatgcaaaagtaggagaatcactaaattagctaaacaagatatcggaaaaaataaggagaagcgaacaaaacacggcattgcaccgtttcgtcaggacgtagaagcgtaattttgaaaattctttcgagtagaaaaaatattcatcaaaatgaggaagaatcgcaatttaaacacatacacattttcacacacatatacacacacatgctgcatacaataacgataaatgtgtcgacgaaagagataaaatcagtgcgttaaccccgaacggtgatcagagtcagattaagcagacgaagaaaaagaacaagctgaagacgacagaatgaaactttaagtggcaagctaccaattacagtcacaacaatgacaacaaatacttcaacacagtaaataagacagatataaaaaagcaaaaattgcacgcgcagtaaaccgttgagtaattatgaaataaacgaaaattaagcgaacaattgaggaaaagaagaaaatgcgatagcagacagacgacaaggcgaaaataaaaataaactatataaaattgaaaaaaaaaaagtaataaaaaataatgtatatttaattattattacatatatatgaaaattaaataaaaattcatataaaataa

SEQ ID NO: 638 - DNA, 4448 bp, Aedes aegypti
atgattcctatttccgttcgcataacagtcccatatattgagcagattgagggttatctggagaatgcccacatgactgtgatagaagcgctgatggtgttgtacgctaaagaagtggcttccagtggacgaatttccagtgcattagaaagaatatctggccgcagtgtgtcgcaaggcgctcagcatcacgaagctgccttactgagctggatttcgcacgtttgcagtgcgctgaaaaggcgcatcgactacgagctgactaatggcgtcggaggtggcaatggaggaggtggcggtaccaaccctgcagtcgatgaatacggtcaacgattgcagagtccgacgatagccccggtacgagacttccgcgagctgtgcgacggagtctgtttagcctacctaatatcgtactactgtcccaaactagttccttggcatagtgtcaaattcaatcacgtaccaacgatcgaggactccattcacaacatcctcatagttagtaatttctccgagcggagtttgccatactcagtgttccacatgacgccagaggacataacctacatgcgaggagccatgaagcaaaatctggtggtattactggccgatctgttcaatctgttcgagatccatccggccaagtgtgtatgctatcccggcatggaacagcagcaggtagccgagtttgatttggtcacaacaactaatccgacaatgatttattttcttccctccttcaatttacctcttacagtgacccgttcaccttctgcgagtaccctacggaagcatgtctccactcgggatatgcacgatcaacagcagccacagtattcacagcatcctcagcagtctcatcagccgtaccatcaggatcaggatgaaggagtgccaacactgtcctcgatgcaggaaccgctggttcctgcacggataagacaagccaaggaaaaaaccaacaacgactccaaagcggaagagcgaggcgatagtattccagcaggtcggcccagcaattgggaggaaaaccggaagcaaagcttttcaggtcgccgatcgcgacgcaactcgctcagcgaagactctcagctgacgatcgagaactttggtggttcgcaagaccagctcaacacgatcggacggttcgatcgggagcgcaagacctctagcgccagtctcacctcagtggaacccgttacgccggcgcggtcatccatagccgatgcacgcggctcgatccagttcgggtacgacacggattcctccggcaacgagaaacaggaccgggacaccgagaagccaactccggccctgcggcggcacaacagcaccaatctacattccagcagcgtcgagcgcgacatcatcgatggtgatatgagcgctactcatggcttcggcggcggaagtggtccggcgggtcccgtcagtgtggccgatgtggaaacgacaccacgcaggaaaacgtcgtttgcgacgctgccgaacaacaccacaacgtggcagcagcaggccatcagcgtgcagaagatggaagatgttgatgacagccagtcgggcttcgaagacgccaccaagatatccaccatcaagctgaagctggaggagaagcgccggttgatcgagcaggagaagcgacgcatggagaccgcctggtccaagcagctgcaaacggttggaaaacaagcctttttacaagctattaacaagtggaatgcacaaatcatcgaaccgaagaaaacgccagatttggagaacatggatttggaacagtatcaacaaagtatatcaaaaatgaactccaacctgcacgacattcaggccgacattcagcgtctcacccagcagcagacgcaaatccaagcgcaaaccctccaggcccagcagctgttgcatgcccaacagatcgccaacctgctgaatcaggacccccagcaggacgaggtgaacgagaagggtttctacatctcgttcgacaacgagcagccaaagcgaccgaagcctcccctccgtaccaaacggtcaccaaagaaggacaaacttggcgacgggatggaacacaacaaagaatccgaaaaacccagccatagagaaaacaatcaaaacaatttcggcacctttagcgtgaagaccgcgaacagtttttcggccaatttcaacgaggagcaagtggtgagccgcaagagcataatcgatagtgcgagttccccgttcgaaacggcggccaccggaagcagtcgggctagcaacaacaacatggcggccacgatggatcgagacattggcgagcggaggcacctggaggatgtaacgaatcacaccagcaccggcagcaatgcgatgaacaacaacaatatccatcattacaataataacaatggagatgggtatggcagcgagaatgagaaccaacggaaggccaaactagtgatagggaacgatgaaggcaatctggatccgaattccgtcgacgagatggaacggaagaaggagaaaattatgcttctttcgttacaacggcggcagcaagccgaggaagccaaagctcgcaaggagatcgaagccatgcagcggagggagaaggagcgggaaaaagaggaggaacgggcacgcaagaaggaggaacagtttgctaggcggcaggccatcctcgaagcgcacaaactcaaaaaggccatcgaagaagcggagagagaaggtaagaccatcgatcgggaactcctgatcaaacatcagcagagccaagctcagctgcaccagtccagccggggcggagacggcggaatgcaccaccaaacctcatcgacaccggcggccaagatgcgaccgcagaaactcagccgacctcggcccaagacgatacacgtcgagacgggctcggtggatctgagcgaaacctccagcctcagtagtcggggtaagaagggatccaactcgaatctgaccggaatcggcctgcacagctcaaactccatgcgacgagattactaccgaggatcgcaggactcattagcgataagagaatcaccggatgaataccccagtagcagctcaacgccgataggccgacgaggctcttacaaaactggaagagaaccggcgacgatcgaacgaggtcgtaccttatcacgtatctcgctagcgaaaggtgccaatttccggggacgtaaatccaactccctgatgaatctatgcggaactaaaactagtccgaagctgtacaaacaaccggcaacgaagtcgaaccggggcatcatcctgaatgccgtcgagtactgtgtcttccccggcgcggtgaaccgcgaggccaagcagaaggtgctggagaagatcgcccgttcggaggcgaaacacttcctggtgttgttccgcgatgcgggctgccagttccgggcgctgtacggctactggccggagaacgagcagatcatcaaactgtacggaacgggaccgagccaggtcgacgatgtgatgtttgataagttcttcaaatacaactccggtggtaaatgtttctcgcaagtgcacaccaaacacctcaccgtgacgatcgacgcgttcacgatacataactcgctgtggcagggcaagaaggcgaacctcccgagcaaaaaggacatggccctggtgatttgaagcggccgctgatcggcggtcagttacacaaaagtgctataacatgtgctgtataggaattcctgcctcaggaatctcgtcgttccaaatccacaatcgttcgctctgctcctgctgagagagggaagtaggattctattctgtgtgtgtcaaaaccaacaactagtaaccaacaaaaaaaaacaggaaagggacagtatttttcttcctccgtgatattgtcgtcgtgcgcgtttgtacgtttgtctattgtttttctgagcctcattgtgttgtaatcatgaccttataacgcggattgagaacgccaggcgaatgtgcgtgcgaagccagaggaatgtactctagtgaatgtgattcaacttaaggattagggactgcgcgaaacgaattgattatgctttccaggagaaacttgattgaacaagttccgcttgaccttccgttgcctagaaagaacacaatctttaataatccataaccattaaagcatagagtcccgtttgctttcttgtgttttctctttgtaaaaaaaggtagcttttctcttgtaaaattctaaccactttccgctgcatgctgagtaagtagggaactcaaacattaacgactgttgtatataggctattatcgatagttagctagcgctctcttccttcttctaaagttacgcgataaaaaaaagttaagttcatgttcacgcggaaaggccacttttaggaaatcaaattatcattgaacaaaacaaagttctttttgttactaccaacactatcgattgcacccaaatcaataaacgtgtagcaagt

SEQ ID NO: 639 - DNA, 1671 bp, Aedes aegypti
cttaacaatttcgtatcatatttgtttgctctgaatagatcaccaacgccgtcttggaagtcaaacactcatagcgcacagactggatcgcccaatatggatagcctaggcagcacgttgtcgccaccttcccgcgcacgcagtcgcagccgcagtccaagtgctcagcgtaaaattaaccagaacaatgaatcgacggcggcggcaacccaaacaataattggaattaaatgccaaattacacacgagaagggctacctcgcttcaccaaatttgactcgccgttcgatgtcgcctagtcctcgtcgtttagatatgaagaaaaagcaaaactcgctggattcgagttcaacggtagcagcacaggcacaagcaactactgttaataatagcggaagcaatcaactgcaccaggcaacggtccactttgagtgcgatcgtgatggttctatcataactgatagcagcaagactgagtcctccggggaggacaaaaccagcaaatacgaaaacatcagtgacaatgggagcgaaatcagcgatgaaggctatcgcagtttgggaataatacaggccaacggaacagcgacaaatcaagcacagaagcgagcgtccctgtacagtcaagcctcaaacgaagatgctgaaattagcgtgcatctcgagcaaacaacctcagactcgcaggttacaccaaccgatgaaaacagttccaaggcaaatgatgaggatttaactacaatctcggatgaagtgacagccaaatccgacgaggttgacagggtttcagagcttccggacaccgtagattccgcaggcaccccagagtccaatttcgcaaaatccggcgtgttcattaccgatgatgagatcacgattgatatcgctagtagcactggtttaagaaagactggattttcagaaaatttgtacgattcaaatggccctgtaacgcctaagccaacgactacggcttctaaaattcccaagtcacccttgccatcgaggcgcaagagcgccgaaggttcgtcaacggccgccagtgacaaagcgtcgactttgagtaggaaaatccctacttatagatctgttcgtaaagtaaatccatcgcaggatcaaaaagacaatacttggagtggcaggaccaccaagcaacgaacacctctcgcagcagatacgtttgataccaaagcaagctctccacaagttccactatcccgtaattccccagtgaggacatcccagtacgacaagaatggcagaaagattaagcctgttagcaattctgtcaacacatctccgaacaaaacaggaccaacgtcgtctttggcacaacagctaatggaagctgcagccggagcccaaaatgatacgcaaatcattgagaaggtgaagcaactgctctctaaatattcctcgaatcaaccgcagcccatgacaccgggtggaaccgagtatgacgactttactaccgcttgggtgaacaataacggagtagtcgaccggaccattagcaattcgccgaaaacgcaatccaagcgaagctcaactgtgtccaccacgtccgaaggggcgaactgcaaggaaattccctcggtcatgtcaccgcgacgggacaagggtgcctcgaagattccagcaccggttcggtccaacaccggactgtactga

SEQ ID NO: 640 - DNA, 6808 bp, Aedes aegypti
tggaatgttttcgcccaccagctctcggtcttgcgtagtgtgatagaaaattttcccccgacaacaccgtggaaaaactttcgccagttgtctcgattttcccttctcgttcgcgcacacagttgagtgttagttcagtgttcagttcatcggaattttcagttttccatttcagtcagagatcagagccccaacggtagaggcagccatcagaacaagcagaaaaaagaaatcagtgtttcaccattccagagactcgcacttttttcatgatgcgttgtcattgtgagagaatccatcagaaaaagtgaaacactcctccgcctagaaggtgataaaatccaaaattttcggtgcaattcaatgattttctcgtgggtgaaaagtgaacattttcgccgttcggattggacgggcaattaaacttccaggaaattggcattttggtgaaaagttggcgaagaaaacgagcgccgcgagaaaaagtgacgagtagttatgtgaattttcatcttattttttttttctcgccttgtcttgttccgtgtccagtcaagtgcgacgccagagaaacgcgactctgtaccgagtgatgattttgaacggattgatgaaataattgtggtggccgagagctggaaatttttttctttcctacgttgatttctgttccccccaaagaagagtgttccgtgtcgctgtgtgaatccataaaaagtgtgcaaaaataacaagagcggtggggtgtaggaggaaagtggccgcaggagaggacgacgggaactagctaggtctggacaccgtaaagcgcgcatccagggggaaaagatggcagcactgaacgatttggacgtcctgcgggcggaaatcgagcgcctgaaccgggaactggaccaggccagcagcgaaaacatccagtcggccaaatacggcctcggtctgctggaggagaaacaatccctgcagtccaagtgcgaggaactggaagccctgtacgagaatgcacgccacgagctggaaatcacacaagaggcactgcaaaaatttcaaaagacacagcaagttaccaccaaaagtggcatcgagcaggaggatgccctgctcaacgaatccgccgcaatggaaacgtccctcaacctgcagatcctggagctggagaacgaaaccaaacagctgcggcacgaactggaacgggtcacgaacgagcgcgaccggatgctgcaggaaaattcggaaatcggccgagacaaatccggcgcggaagcggaacgagcccggctaaaggccgagcttaaggacatgaaatacagggaaacacgaatgctcagtgactacagtgaactggaggaggagaatatttccctacagaagcaggtgtccagcttgcggagttcacaggtcgaatttgaaggtgccaaacatgaaatcagaagactcgcagaggaaatagagttgctcaactcgcaagtggaggagttggccagtctgaaaaagatcgccgagaaacaaatggaagatgcattgactgcgctgcaaatcgagcgtgaacaaaaatatgcactgaagaaggaacttgatacacatatcaatcgggaatcgttgtacaaccttagcaatatggcaatcacggcaatacggaagggcatagacgaaagcacgctgaatagcagcgattgtgaagatgaacagcctgccttgaaagactcgacactcaaacggttggaaactctggaggcagagacggccgacctcaagtccccggacggcaccaaggtcgatctgttctccgagattcatctgaacgaactgaagaaactggaaaggcaattggagtctatcgacaacgagaagctcagcttgacggccaacctgcgagaggctcaacagaatctggacaagagccagaacgagatgcagaacttcatggccaagattatgctgctggctgctcacgtggatgcacttgcaaatctcaagaagcagatcgcgtcggaagacaaattcgcaaatgtgtcgaacaacaaggacaaggtaatgaacgacaagctgaacgaagctatcctgcaatactcaaattggtttacgctcagctcgaaggaaatcgacactttgaaggccgatctagtcgaactgcaaaagggtctgaactgttcagatgccatggctgtgctacgtaatgaaattaccaacctaaagaataagttactatcctcagagcagaaatccctggatctgcacagtgacgttcacgtgctgacgactctgtcacaaaccgctggccaaagtctcaattccacccgcagcaatttggtatctctcagcgacgatctcgcacagctttatcatctggtgtgtacggttaacggcgagacaccgaatcgtgtcctgctagatcacaagaatgacgatctaagcttcgacaacgattccctgtccgccatccagtcgcagctcaagtccgacatcctcacctcgaagccgcacgttttcgaggatctgcaggcgctcagcgatgctgtggagatcaagaagtacgtcgatacgatcagcgatcaaatcaagtaccttaagagcgcggttgaacacacgatcgagctgaacaaggacaaggtgtcggacgtggcagcaggcgacaaggatgccaaggaggagatcgccgatctgcatgaacagatcatcaagctcaagagtttgctctcgacgaagcgagaacagatcgccaccctgcgaacggtactcaaatcgaacaagaacacggccgaggttgcgttgacgaacctcaagtccaagtacgagaacgagaagctggtggtgagcgacaccatgtccaagctgcgaaacgaactgaggatcctcaaggaggatgccgccaccttctcgagtcttcgggcaatgtttgctgcccgttgcgaggagtacgttacgcaggtcgatgagctgacacaccagttgtcggcagccgaagaagagaagaagactctgaaccaactgttgcggttggccgtccagcagaagctgggtcttacccaaaaactggaagacctggaaatggaccgtgaaatgcgccacgtccggcgaccagcgatgccagctcgaggcggtggcaagtccgctttctctcgtggagttcccgcccgcagtagcaaccagaacccgaacaacagcagcaacaatccgaaccaggcattcttctaacataaggttagcgtacagcgtaagatcttagcctttctttacactctgttgaagatgtaaagagcccgaagccgatgaacgtcgtccaacatttttgagtttcatcactaagggacgttccttcgttgggttcccttttcctcttgtgtggaaattgggaataagcgaatccttccatccaatcaaaataggttttccccctagtttacctacaatcgtaagccgtaaattgtttaccagtgcatctgcatccacatcactgtccgttaggaagtagtggatgggctctgcgtctcacctgctctttttgtactatacaccggaggttgaatgaactaaattgtaagccagtactaaatgtgcgacgaatgtgtgaagaagcatatatttttaataatattataagacaacagacgcgcgttccgaggaacggatcgggatataacccggttgagaaatatgcatacatacgaagtaagacgaatgtgtgaaagtatatcgttaatttattttgataagattataatatattactacacaacaacagtggctaacaaaaccaatattcaaacagtttattattgctatatgtttagggatcaaaaaggggaagattgaatactgtcttgtctacacatgctgtacgcgaaacatagaacaaaaaatggaatttttaaattttcttgtgggctacctcgttgaaatttgcgaggtagatttagtcatcgaggaggtatatttacttacaagaaaatgagtaacaaattattattgtcaaacaataacgttatcgatgagattgaaaagttgtagatatttattttggttctcattttgcgattgacagtgcaataactttttttttaattatgtttttggttcgtttcatttcattacgtttgatggtaaaattatcgattgattagacttcaacactatatgcagaaaagagtgataactttctcagatcctattttcaaattggaccaaatctattttagggaactatttagaacaaaagcatggtatcgcttactataactaacataaatcgtatttgctccgtttgttatttttgaaaaatattcatatcttaattgtgattttacaaaaagaaggaacaccgcgttgctcacagtttttgtctagaattagtttttatcgcggtgttccggagcaatccgttttgtatctcccaagcgattgtacatttgatagctttttaacgcatcctggcagttgctaaaggtagctcatatgtgtaaaacttaatcaatctagcattagagcctaggttcgaactttagtgctgtagagtctaatccaatagcttattgaaggaagtgtcagtaaaacagcagcaagaattcaacatggactcttccttggaatcaaaatgcgtgctttttaggaaaatgatttgcaagcttgttcttagaagacattagagaaaggtgccatcaactctctaatcgcataattttaccaacttgttttggttcgaatcacaggacgaaacattttctagagtatgaccttatcgttgcatattttattgtattctatgaacaggtcatccgtcttgaagtatatttgacgtggatgttcaatcctacgaaatcggagctgcaacagattaaaacaatattttaggtcatgcaaacattgacacaaatcgaatgattaggtctttctagaatttggtcctgtactaccttttattatttccggttttaatcaaactgccgaaacaaatcttgaaactaggatcgtaccaaatgaaaaatatcacaaaaacttacactgtgacaaagcgataagcaaacatcacgattctgtcctcacgttttagaaaaaaagaacaagtttttctatcaaatgaagagcgtccaaaactaattgtcaaaagtttaataaattccaattagaagagttagaataacaaagcaaaacaaaaaacgaacaaatttatttgtgaacacaataagagaagcaaaggaagaacgaagaaaatcaccgagccatttatttatttaaacaattaagagaaatctgaatttaaatctaactgtgtgcgttgaaaaaccaagtgaacaatctcacggtcccatgagaagaaaaaaaatgtccaccttgactgagtcgattcgcatgggatactaagcgtaagatgccacactaataatgaataaattaatcaccgtccctttttacgagatcgaagtaaaagtaaaagcaaacaattcgtgtgtacgtgtatgtaagcagttagtaggaaaatcaataatctcatttaactgattgtttgataaaggtaactgttgatcgttaaacatattaagatatcgtgtgaatcatccaccaaagttttcagtttgttaattgtttagcttttttagaagatgcactctctggcaaaataccgcgttggctagatgcatagtgcttcagtttcgtttttgcttgatgatccgtttttattaccatcaaccaatggctttttcaaatggcttgttattgagtatcggtgaaaaaaatcatgttcaaacgaattgtaatgaagaatcgagaaaagcaatgttttctttccaaggaacacgtcgttgcttacaggcagacatagttgatatgatccgaacaacaaagaagtaaacttattccatcttacacaaatgaaacgaaaaaagtaaaagttactgtccaaaatagaaagattaaccacatactagagattttagtagccatagccaaacagatatgtagttaataagttcagtccagaagagtatctgtagcgaggccattgatcactgattcatttgtcgcgccagaatagaacataccctagcactttgggaactaatctaaacagcagagtttactgaaattcgttctgtagatagtaattaaaccataccgcaaacgtatccatacagtgattgcagctcgataactaaaacaactaggcattgatatttgatttttgaatcaatttgttgataactacttcattagtaccagttcgatcgttgtcagattaaagagtagaaatacctattagtagacgtttacatgttttccatacgcaacctaacagtcctgatagaccaggttctaaaatacagatacatacaaaataggttttaacctccctaaagaacaaaattggaaagagagcatcatgcaaaagatattctaaacaaactgatcctcaagcacgaattgttttaagtatctttttgagtttctactttgagtgcagagcagtaaaaataggatttccgtcacatcacagattgtgtgtttcgatgagcttgatagctagagcaataatcgtttgtaaccgattaatttatagaaatgcaaacgaaagtcattattatgtgttagattctctccccttgaaacccaacagagcaaagatacgaggtttgataattaacaacgcactaagaaagtccccagccattactgtgtttgcagctagaggcaggatagtaattatcatttgctaacttatattaatttattgtatctcattgaaaatgaccgtcaaatataaggaaacagtctatattgcaaaagtcttacactgaaacaagaccttaaataa

SEQ ID NO: 641 - DNA, 2316 bp, Aedes aegypti
cagcaaaacgtcgcgaatgcggtcgagtccggtaaacaggcaaagattcatctggcactgcagaaactggaacaggccaccgtgagacgattgttcgtgaaagcgttctctgctgatggtgcatccaagtccttgttggttgacgaaacgatgacctgcgggcacgtcacgcggctgctagccgacaaaaatcacgtccaaatggaaccaaattgggccattgtagagcatttgcccgaacaccagatggaacgattgtttgaagatcatgagctgctggtcgacaatttgatgctgtggagtagggattccaagaatcgagtaatgttccttaaacgaccagacaaaacgtcactttacaaaacacctgaattgtttcttccgggaactcagatggctcctggcagcgaccatgacgagcatacccgagcgatgctcctggacgagtttttctccgggaacaaccagatcccgctggagggtcccctatatctgaagagcgactccaagaagggctggaagaaatatcacttcgttttgagagcatcgggcctgcactattatcccaaggagcagaaaacgcgctccgtgaaggatttgctgtgtttggctctgtttgctggtcacgaagtctatcggggagttggatggaaaaagaagcataaagctccaacggatttcacgtttgcgttacgctgtcctaaggtgcccccaggcgccaagggtatccgttcagtgaagatgctgtgtgcagaagacgcagcaacgttggagacgtgggtgacggccattcgagtgacgaagtacggtaaaaagctcctagataaccatcgatcgttgacggaagatcttgctcgtgaagaactagacaagctgtcatcggctcgtagtggttccatgggtagcattgtatcttccgttccatcgcagtgtagtggaagtagcagtaacagcagtggaattcctgctcacaacaacggtcggttgtctcgtgcatccagttctagttcaagtggttgcctatctgatgaaaataacggttttgattcggagtttcccactggaacgatcaagcggaaaccatcaatgaagccaaatttacctttgacatccatgacgagacaattgaaagaagtcggagaaacaacacggttgaatgattcctcaccaacgtcaccggagcggggtggtaccttaacaagacgtcacagccggagaagaagtgaggaaagcaacaacagtggaactcttaagcgaagaccaatgaataaccgaggatcggagaatgtaagtcctccaacgccaacgaaaacgatcactccactggaagcgatgccttcgtgtatgacagactccacattttcgctgcctccaccgccagatgatcttggtacaaacttctcaggttctacattatcgctagattcgctccccccgccaccaccaccaaacgagttagataatagtttcagtggatctcagttgtcattagttagtgtccaaatgccgccaccaccaccaccaaacaatctcgaagttactaatagcattaaacaatcaattatgatgttcaacagtcaaacgctgccaactccggtaatcagcaacggcaataataacgttaaagtcgaaccaatatactcaaagactttgaaaccatccgttttgaaagctccaccgtataaagctcctccaccatacaacggagatgtttcaacggcacagactcctcctccaccgccagctaaaagtgtatcattcgccgaatcacctgtgctactgaggcggaaggtttgtttcgaggacgaagttcaagaggttccgatttcacctcgcagagcttcgcgcgatatatattccgctcctcctgcgcctcctcctagggccgaagctactcgcttatctacttcgtacacatctccaaagcgtttgagtgattcggcatcgaatcccccgcgggatttcctcaaagacttgcaaagggttatgaacaaaaaatggcagattgctcaaaaatgtaaactggaaccgtccacaactccgcacgaggtgctcggttttcgggatctgccagcagaacaatattcatcgcattactacagggaatcgtctaacgtaagccactgggttcaggaacactacggttccgattgcatgtatgaaaacctgggaagtaatatgggcgtcgaacctgcttacccgatttcggctccagtggttggtgctgggccaatcaagaagaggcctccaccacctccgccgaagcgaagtgaaaagacacagctcacgactacggcgccacatcaaaggttataa

SEQ ID NO: 642 - DNA, 9417 bp, Aedes aegypti
atgctgtcccgtgttcatgtttctcctccgcaggtctaccaagtggtgtttttcacgatgcgtgccgctatctcacctctgccggcggcgtgggctttggaaaaatctacagacggcaaggtttacagcgcatggcaatactttgcggcagacgacgacgagtgtcgggagcgtttcggtctggcagctcacagtgctaactacatcttcaagaacgactccgaagtgatatgctcgacgcaattttcctccgtagacccgctcgagagtggtgaaatcaacctttcgctcatcaccggtcgaccaagtgagaaaacgacttcacaagagctgctcaatttcaccttggctcgctacattcggattcgcctgctgcgtatgcataccgcagtgtttcgagatggcgtcagtgccgacagtggagtggacattcaggcgcaggcgaaacgaagcttctacaccattcgttcgctgcggatcggtgggcggtgtttctgctccggacatgctgcaaagtgcaaagccaacgataataacatagacaatcagccgcggtgcgaatgcatgcacaacacttgcgggacccactgcgatcggtgttgtccgttgtacaaccagagaccctaccgagttggaacgccgtttcaggctaacaagtgtgaaaagtgtgagtgtaacggccatgccaaggaatgttattacgatcgggacgtggacgaaaagggacttagcgtgaatgtccgcgggaagctcagtggtggaggcgtctgtatgaattgcaccaaatttaccactggcatcaactgcgaaaagtgcattcctttttattaccggccctcggagagaatgccaaacgcagaagaaccatgtgtgccgtgtaattgcagtgcaaaaggatctactggtgaatgtaatccgattggtggcgaatgcgtttgtaagaaaggattcacgggttccagatgtatggagtgtgctcccggttatcatggagaaaactgtacgaaatgcctatgtgacataaaaggaacaatgcctggaggtgaatgcgagtcacattgtcagtgcaagttgcacgtggaagggaaacggtgtgatcgatgcgtatcaggatacttttcactgagagccgataatcctgaaggttgttcgaaatgcttttgctcaggaataggacaaacttgttcgagtgcagatgtgaacagttctagctatggtacattggaaggctggagtgttacggatttggcaaggtcaagaatggtttatcccacgagagacaacgaaacgggattcatggttattggaatgtttgagttgtcagaaactgaagccgtgtattggtccacccctaaggggtatttggggaaccgattgcaaagttatggaaataagtttgttttcaaaacgtcttgggtgatagttcgtggtgatacaagtggcaagccaaccaccggtccaagtatcgttctttgtggtaaaaacggaatgaaaattgcatacggagatgaaacatttactggaccttcaaacgcaactttggagatagttctaaaagaagacaattggtatcatgtgccgaaaagtgtaagagacatagttacacgactgaaaagaactgaatatcacggtgatccagtgacaagggcacaattcctatcagttcttatggacgtcgaaaatatcttgctgagaggaaccttccacaccgatcaggtggaaagcgttttggaagctgccaccttacatgaaggaagcacagaaaccgaagtttccgttggtgaaagtttagtggaaaagtgcgattgccctccgggctacaccggcctgtcatgtgaacaatgcgcatttggacatgtgagaatctatgaaaacacaatcacccacgaaaatgtggccaagtgcatcccttgtacgatgtgcaatggacacgcggaaagttgcgatctggaaacgggtgaatgcggattgtgtcatcataatacattcggtgacacctgtgaacgatgtttgtcggggtattttggcaatgctttgcttggcaatccgaacgactgtaagaagtgcgcatgtccgttggaggcggaaaccaacaacttttcgccgagttgcctgctcaaaggaggaactgaattactaaacaatacggaatacatctgtacgcaatgccccgaaggttacacaggtgatcattgtgaaatatgtgacgacggttattacggaaatccgatggaagtgggtggtaaatgtctcccttgtccttgtcacggtggtccatgtaacgcaaggactggggagtgcatcgagtgcttgggtaacacggagggatggcgttgtgagcgctgtaaaagtggctactgggggcttcccgacgagggatgcgaaccatgcagttgttcagaaattggtgctttggagaatgtctgcgatgtcattacgggacagtgcatctgcaaagctcgctacggtggacgaaggtgtgacgagtgtgatagtggctacgggaatctggaccttgattgtccggcttgcgagtgtcatgcgaatgggtcggcaaatggggtttgccataagctcagtggtcagtgtgtgtgcaagttgggcgtcgaaggtatcaagtgcgaccagtgccaggaggagttctttggcctttcggaggagttcccggacggttgcgaaggaacagcagaatccaaatcgcgaaccggtaggttcttaagatgctcaaactcatcggctaattcacggatcttcattgtttgctcaggatgtcgttgccacgtggagggttcggcaaaccggttgtgtcaccggcaaagtggacagtgtgtctgcaaacccaacgtcatgggtcgtcagtgcaacaagtgcatggtcggctactggaatgtgcagtccggagtggggtgcattccgtgctcgtgcgatcccaacgggagcggcaaactcgagtgtgatacgaacagcggccagtgcttctgtaaggacggagtcgaaggcgtcaagtgcgaccgctgccagcagggctactacgggttctctagtcaagggtgtaagaggtgtgagcaatgtgcgagtgcagcgtacgtgtgtgatccggacaccggccgatgtgtgtgcccaccgaacagtcacggccacgagtgtcgtatctgcgctgttaacacctggggtaacgtgttccagaggggatgccggcactgtgagtgcgatattgcaggctctattgggcagacatgcaacagcggtaccggacagtgtaactgcaaggaaggctacacgggaaggcagtgcaacgaatgttccatcggttactacggttatccgaactgtcgccggtgtgactgtgatgagcggggatcgattcctaattctgacggtagtttggactgtgatgaacacggccagtgtcattgtaaagcgatgacctttggacgccagtgcgatcagtgtaaatcggctaccttcggtttggcctcggtgaaccccgacggatgcacgagatgcttctgctttggtagatctcaggattgtgaacagagtgagctttcatggggacagattcgcttacaaggctcgcggaatctgagcgttgagtatgtagtgaaagatgtggatgagtatgattttgattacgttgtagtaatccaactggagggcaccagaactaacagagagctgtctgaggttaaaaccatgaacaacttagacttgatccccagctcaacgggaaatgtttcgattggagcttacagcgcgtttcaatatccattgtactttcaacttccatcacagtttcttggcgatcgcaccacaagctatggagggttgctgaactttactttggttacggtaggggcgtatcaaaatataccggaaggatcgctgcgacaatttcccttagttcagttgcacacccatgacgaactagttttggattattatgaagatcagatagtgtacggagaggaagtaattcagcattcgacattactgcacgaaaggttctggaaaaatcattacgatggaaatgtaatcactcgagcaattctgatggttgcactacaagacgtaagacatattttcgttcgaggcaccatcagcacaaacttccgtcaagttttattgacgaatgttaccttggacatgggaatcttcgtggccggcgcagaaaacaatcatgctttcggaattgaacgatgcatttgccctgctcaatacagtggattatcgtgtcaaaacccaggacctggttactatcgatttaggccgcagattccgaataagctacccgagacgattgatgattacgtcgggaagagtcttccatgcgactgcagtggtcgcagtaacgagtgtcatcctgaaactggagtgtgtctgaactgtcgaaacaataccggtggagatcactgtgaagtatgcgccgatggattctatggcactccgagtcatggatcttgccatgcatgtccctgtccggaaacgaggaagaacttcgcaaaaggttgtatcgttcgaggtgacaaagtgagctgtatttgtaaaccaggctacactggacggctatgcgaggcctgtgaaaagggttactttggattcccacatctggaagatggtcgatgcgagtcttgtgggtgcaatcgtgagggtagcatatcagatgaatgtgattcctggactggacagtgccgttgtaaaccgggcatcaccgggatgaaatgcgatcgttgtgagcaaccgaaaaacattgtgcagaactacaagtgcaaaccatgtgataattgtactgtaactctaattgatgattttacttatctcactgatcatttggatcgagagacggctcacatcgacaagaacggaattccagctccttggatcgatttggagcactttgaacaagaatctgaaacgctgggagcttcagtaggaatgctgttggatgtcaaagatcgagtggtcaatttcgatcaatccatattggatagcatgaaacgcaatgcaacccgattgaacaaacatcacaccaaacttgccaatcgattggacgaattccgggatatttcagtgatcaaaacaatggaacgctctgccgcactggcaaacgatgtaaacgaaatgaaaaacgaaattgaagacacgattcggattctgaacaactatggaaccagtgacagccacatcaaactaccagcagcattgaaggaagcaaccgatcttctggaagatatcaaacagaaatacgcacagagcaaacgacgtccggagattctggaatgggcgcaacaacaatatgatttgttggggaacaaatcggaaatcttactacggcagaataaaagactggatgactacatgtatgaggttggagtgttcaacgatcggatgcaacactttgagaggttgaacaaggaggtcttcaataatgcaacgttgaccgagacgttttccagcaaaaacagaagaaagatggctgaagtggagcgaagttttcagcaggccgatgaaatggttgatgaagtggatgggttcttggatgaagatataatggcggaaagtgtagtgaaacatgagcagatcaaggacaatcaccaacagttacagcaaaacaaggaaaacttgaaatatttaaacgacgctttagagcaaacgattattgagtttgatcagaaattcgaaggtctaacgacgaatgagatacctgtggcaaaggaacatgcaaatcgattgaaaaaagaatcggacgaattccagcagttgtttaaggatacggagaaaggagctgcgaatgcaatgaaagccagtatggcttatgagaatatcgttgccgctattgtttctgcacaggaatccgcagacaacgcaaccgacagtggtagagtagcgaacaataaggtttatccgctgggaggtgtttcattggtagagcgtagcgaacatgcggcaaatgtttcgtccaatattgaaaagaaagcacataaagaactagagaaggcaaacgaattgaacgaagtgatggtgtcaaaggagaagcaagtcgaaagcctgcaatacaaaatgcgactggcgggagtggaaaacaacaagattgtagaggaagaaggattgatcacaagaggtgatgcgatgaagaagttacagggaacattggaccaagcgaacattgtctcggatcagatgaaatttgtacgggaagaagctggtatgttaaacagtgatgtgtacaagttgaaattgaagctagctaagttggaaccggaatgggacacaaagtttggaatggcagaggaaaacgtttcacagtcgttgagtaacattttgaaagccaaaaaggaactaagtagagtagagaagttggacaaaatccaaagtgagaaatttagaacatggaatgcgtctttttcggctcaacttcaagagttgaaggataagattgcccgggctaagcatgcagcagaagggatccgtgtatccctcgagtctcaaagtgattgcgtgcgatcatacgctccggtatcgtatggcccatctaccactaatcgcatcatgatgtctgtggccttaaactctgacatcaacgattcaccactgatctacatgcaaggagagaatcatcgatttgttgcgcttgaaatgcacaaaagaaaaatacgtttggtttggaatcttggagataaagcggtggtgatcactcatccaacggaaataaagcagcgtgatccaaagtatgacgacgcgtggtatttcatcgaagcaaatcgcactctcaacttggcttacctgaacgtccgacgaatgacgcatagtggtgtattagttcctacccattccgttgaaggagcgagtagcgcttcattttccacaatcaccatgggtccaagcagtaggatttggataggtggagtcccagaacatctacaaactcctgagctgctggctagagatggtcttggggtagttttgagtcaattgtacatagaccaacggcagcttggtttgtggcatttcatgtcttctaccggaaactgcgaaggggccatgctagggccgcaagaaagctccagcacaaccagcgagagacatttcaatggagaaggctacgctgtgctgcagaagtcatcaagccataggagcaagaatcaattcagtttgactttaagcttcaagacattggacgagaatgctttgattttcctagcgctggacgaagtcaataatcgttcaatttcactcaccctctaccaaggccgtttggtattccgcgtggactacggaggtgactcaaaactggagatcaataccacaaaccgttataataccggtcagtgggtggttgttgaagctgcccgatcattttccaaaggtagtacggagaatggaattcttaaggtggacaacaaagaagagttccgaggggcaccaacgaaaccgatcaactcaggaatgttacccaatttgagtgagaattattatctagggggagtgccccctggcttcaaatctggaacaaccaaagcacccggtgcggatcatgctttccttggctgtctgaaaggagtacaaataactggtgtttcttacgatccactggatagctcgaaacattttggtatagaaggctcttgtattgataccataagtagagcaggattctacggaaatggttttgtagagtttccctctcatagcctaaggaaacgagccaacttcgggttcgttttccgcacgctggaaccaaattgctctctattgttgtctggattcccgtctagtttgtccaacgaatacgattcgaaagacatgcgcggaaactattccgtattcctttacgaaggaaagctaaatctatgggtagactcaggagcaggtcgagttgaactagaatcgaacaataccttgaacgatggagaatatcacgttctcaaagtgataaagcgaggcagagcagtagaacttcgagttgacgacgagtttcagggagctaagtcattgcctaagcagcaagccttggtcaacatgccaggagaactaggaggtctatttctgggaggtgttccagatgatccagcatttgattccctctccaaatcattcaacggcttgaagggcgtcattgccaacgttgtgttcaacaatcgaacggtatcgttcgatgaggctctcaatttcaccaacgttcagatgggtcgatctggtccagaaatgggttccaacattctgcatacgacgctacagcagactcaacctttcagtcgaagcttcaaacctccaccagagggatgcaatagggttggaagctactcttatgaaccgaatgctttcaagtatggtgataaacctcagagtcactcgatagtcaatgttgcagctcgtcacctgtggcagcgaaatttcaacatccagttcgatttccgcaccttctaccctaatggagtgttattcgtagcattgggctctaaagacaaagcgaagcacttcataaccctggggctaaaggatggatccttggcattaacggtgcggggtcgcaaacgggatcagctggtgctgccggtgaagctcaacgacggccagtggcatcacgtatcactgaacagtatcaagaagaaagcaactctgagcgtgcaaactgagaacggcctcagctcggcgcaaatcaaactaccaaagaaactgaatgctgccaacaatctgtttattggaggcattccagacgaaacaccactgccgaaagagctgcaaccgaagccggaggagttcaagggatgtttgaagaagttttcggtgaacaacaatactcaagatctggcacggccagggcggcacatgaatgttggacagtgcttcccgcgaatcgagcaaggttcatatttcccgggtgacgcttatgccatatacaagcgtaacttcaacgttggaaagtttatggatgttgacctcgagctccgaacgtcggaagtgaacggaattttgatgagtgttgccgaacccatcaatgggttccctgccttctcgctggagatttccaatggaaatgttattctttccatcgacgttggtgatgggtatcccatccgagttcagagcacactgccttccaagtacactttgtgtgacaaccggtggcacaacgtatccgcactgtacgaagatcatcagatagtgcttcgggtggacgactatccgcccaacactctactggtacaatccaacgatgtcctacgaagggtggcgaccaaggcccccctctacattggagggcttcctgataccgcaccgagcgggacacttcttctgcgtgagaacttcaagggctgcatacgaaatgttgtgattcgaaacgaacgaaaagattggaccgatatggacaacctccacaatgtgttgctgagcgagtgtctggcagttaattga

SEQ ID NO: 643 - DNA, 1505 bp, Aedes aegypti
cgcttgacgggaaaaaaaaagtgtgtcatcggtccgtgtcgcgtgtgtattttgcaataaaccataaagcaaccccctccggagtgaaactaaggtgaggaaaggatactcgctctgccgtcaaaaagtgacccatccccgggattgggacgcgaatcatcatcactcgtttggaagtttttctccgcaaaagccgcccccggaaagcagtcagaagaagagatacctctcaagattgggctgagaagatagtgcacaagaaagagatagcctgtggctgtgtgtgaccgtatacgaaaaaaaagtgctgagtgttctggtgtgttacatgtttggccgaattttgctggcctttccggtgtgttcccttggtgtccctgagattgttggacccacgcctcggttcacgggttccggatagttccggtagttcggctcggatagttgcgctacacatagaacaagaacgcaaacgacgaccgaattgatgaggagaagctgaacgagattccaaaatgattctgctcgagatcaataaccggattgtggaggaaaccctgactgtcaagtacaagaatgctatcgctggcaacaaagcggaatccatcgatgtcactgtagcggactttgacggtgtgttatttcacatttccaacatcaacggcgacagaaccaaagtgagaacgagcatatcgctgaagttctacaaacagctacaagagcacggagcggacgaactgctgaagcgagagtatggagacctgctcatcacaccagaggacggctacaacgtttcggttctggtcgacctggagcagatccccgacaactgggaggaaattgtgcgaaagatcggtctactgaaacgaaactgcttcgcgtcggtgtttgaaaagtacttcgacttccagtcgcagggtgaaggagaaggcgaaggccagaagcgggcggtgatcaactaccgaaatgacgagacgatgtacgtggaagcaaagtctgaccgggtgacggttgtgttcagtacgatattccgcgacgaggacgacgtagtgttaggcaaggtattcatgcaagaactgcgcgaaggaaggcgggcatcacacacggcaccgcaggtgctcttttcccacagggaacctccactggagctggccaacaccggagcacgggtaggggaaaacatcggatacgttacgtttgtattatttccaaggcatacatcaaaagaaacacgtgataacacaattaatctaattcatatgttccgcgattacttgcattatcatattaagtgttcgaaagcgtacatccattcgcgaatgcgggcaaaaacgtcggaattcctgaaggtgctaaaccgtgctcgtcccgagccgaaaaatacagaaaagaagaccattaccgggcgaacattcatcagaaaggaatgattttggaactcatcggacatctagttgttaaatgtgtaagtaaatatttactaaaataaagcttcgtcggaagtg

SEQ ID NO: 644 - DNA, 5177 bp, Aedes aegypti
cgttccgctatcattgcgtttgggactttacgctcaaccggtaaaaacggtaccgtaaagcctaacggaaaagcttcatgtagtgatgtgacaaaatctgaatatacttgaccgatcgaaatagcaaacactgttctcccgtcccgacggctcttttcaaacaccgaataagactgctctctgattggaatcggtaatcgatgggaaagttttgggtcaacttttcatacgagaaagctttgctacttttcatgcataccaacgatgaaacgacgcaacactctcaaatcacactctctttctctcgctggggacatcgcattgatctcacgcgacgccatcttgctttttggtccgagtagcaaaagctcagccaagcccattcaagttgcggtgtagaagcacgaaaagttgtgcagtgatgcttcttgctggcggacatgttggattttgcgatcgagcgaacggcggaacagttttcgaattcgagtcgagctcctgcagtagggctaaaaaatcggtgatttaattcgcgtcctggtccaatttcgacggttaggatttcaggattcccggtgcggtcggaagttagtgcggaaataacggtggaacggatttatttacggcggaaaaaagtgtttcaatccggcttggttatttttcggtgtcgcgacgaggattcttcagtgttttcttgtttttctagaaagtttttttttttggtctgagcgaaactggaagaatgaaaatagtgaaagcttagtgaatttcaatattgattcgggaagacagtgattgtgtgaaagatttttaatgtgaacaaatatttgacagctgcattctaccacatctaaagtgacaaacctgtgaaacagaaatgacgcgcataacggaaaccaagtccgttaaggtggacaactggggtgtctttttcctgcagaagttgcaaaacttcttcaataagaccgatcactgcgacctgacgttgcagttcaatgacaactcgcagcttaaagtccaccggctggtactgagtgcttgcaccgactatttcaacatgctggagaacacgtgcgaaatgtacgacgatgtgctgatcatgccactggatctgcaggcggatgtgattgtgccaattgtgaacttcatgtacacagggacgctggagtttcagtacaacatgtacgaaaaactgctgaaaacagcacgagatatgaatatgaccgtgctattgaagctgttggaagcgcataagcagaccaccagaatggtacaaggtggaaggcaaccgatcgtgctgaacaagcaagctccaaatgcaagaccccgttctaccgcacaaagtggggtaacttatcaaatgccagcatccgtagcacgaagctatggatcggtaaaacaaactacacaaacgagaatggcccagcgacctatgcaaggcactaaagttaatactgcacttgccacaatagcttcaggctatactgcaaacaagagcatgagcgttcctgagcccagaactctggttcaaaagtatggagcagcaaaggaaagtcaaccgggcccctctagatttgacgaaactggtgtctcggaaacattggaaggagcatttgatgatatctcgtacgaaagcaaacctttggtgacggctgaccaaatcaaaaaggaagaagaaacatctcctttcgagaaactgcgaaaaggatacaccaatgtaagtgttacaaaacgaccagcgccagctagcttttctacgcctgttgcgaagaaacccaatcttgaagaggttaaagaattcacggaagccgctagactgcgaagccagattgcggccgaagatgatgattcgccaggttttgctgacgatactcactttgatgaagaagaagaagaagcgcagcaaccgcagcgaccccaacagcttccgacgaaggccagtccccacactccaaaacaaatcgtcatcaaacaagagcagaaaagttcaccaggctcttccgcaactgttaaacaaattaccgtcaaagatgaatccggaaatgtagatcatgcaaagatcataagtgaggtactgaaaaagtatccacatctagtgaagaaaaacaagaacatcaaattgaagatcatgcaaaaaacatctcctgcacagtcgtcctctgggcagcaaggtcatcatgcaggtccgatgaaaatggaagttcgtacggcaacacccttgaaggcagacatttcaatggttcgcaaagcaactgagcaagtggcccgtgctccggcacctgttgccacttccacgccgggtccgaaaaagattgatgctaaaaccatgcatgcattgatcgcaaagggagcggaaaacatgaccggcccttggctgtgtctacgttgcggcatcgatggacgacccatcagtattcccagttacaaagccttccgcaatcacttgatcgttaagcacaaagagaagatcgacgcacgcatttgcgaacattgtggctggaaggccgagcaacgcaatcccaatcttttctaccattggctgacggaacacaatatcaaatctactatgaaattccccacttgtgcggaatgtggccatgtagcaatgaatacagctgctctgcagaagcacgaggaagaaaaccatcagaggggcgatctacagcagtgcatttattgcaacaaagttttcgccaaggaaatggacctttacgaacacatgaagagcttgcacaaacaaagggcacgcgaagatggtgtcatcgatttctcggacgatgaataccacgttcaagaggatgaagaagtttctggcactccaaacacgagccaggaaaagcagattaaggttctctccaacataagtatcacgaacaatgccggaattccgtttgtcattgaccacaggcaggcgcaaacggtgtcccaaataggaggcaaaccgcagatccagttgcaacaaattacacttgaaccatcgtcggaagcggaagcactcagtaatgtggcatccggaattgctaccagcttaggattggtagacagtgccaacgtcgttatcgaagatcatcacttccagggccaatacatcgagcaccagatggcaacggttcatggcgaaacggggacgacaaacacggtgacggccaccgggccggatcagctgaccaagctgattaccgaagatggcacggagctgcagttgacacagagccagaaggaggaaattttctcgcagctgcagaacagcggaaacggtggcaatgtggtgatggtgctgaacgacgataacttcataggcggtgctggaatacagttggaggatggcactcatctaatttcaaccgctccatcgggcgcacaggatcagaacatcgttgtaatgtacacccaagcggagcaggaccaaggcacacacagtttaatcacaactacggcaccagtgacgacaaccgtagtcgaaaacgcccccagtgaacaaatggaacatcacgaagaagtgcaggaagcaacaaagtccgcagctgttaccgaccatgaagacgaaacttctcaagcatctacgcaaccctcggagaaagcatcggaaaaggacaccgagcacatggaggttgatcccgagagcagccagcatgagactgatttgagtgaatcagccgatgtcgacgactctaaacatgcagaatatgaagaggagcagaaggctgccaaggaacgtgagaaacaaaaattaatatctgagctcgaaggcgattggtctgaggatacggaggaacaaccaactgctgcagaacaaaaagaagaaacgaagaaatcatcgccaccaccagaaagcactgagacatcaacaaaaattacaggaaaggaagcagctagcaagaaagaaacagtcgctgaatcagaagcagtcacagaaaagccaagtgagaaggaaatcaatcaactgttggacgattggaacagtgaaagcaaactgaccggggcagaatcggacgttgatctggagaaaaaactggaaaaagtcgtcggcgaaaagggtgcgaaagatctgaaagagtcggaagaagagactcccatggagacttcagcgaccgaagacaaaacggctgacactgcagagagcagtatgaatgaaagcgaaacacaggtggtgatattggcagcggcagaaagcgaaactgatacctcgatgaaagaagatgcggataaaagtcaggagagccaagaggaggaataccctgcttccgagtccgaagaaaagtcgaaagtagagagtaaaaaggatgctactgaagaagaacaagaggaatcaaaagaagatgaagaagacaaaacgaaatcgaaggaagttgtcagttccttgcttggcgattgggacgaagatgatgatctgtagagagttgttatattctagtagaataacagaaatacaatataaagtgactttttagatgaaaaagtttaatgtgctaatattaactgtagcatacaaagtttaacacgaatcggtaatagcattacactgttactaattttatagatcaagttttatgtcatacaagcaatgtaaaacaatcttcttttcagaaccttttcaaatgacttttcactaaccagtgttctctccttagaaggcattttattagattcgatacttgaaataataaatagtgtttttgctaattttcattattttcaaattgtcgattcggttttatggcagggataaaagcctactgaggcaaacccatctgcataaaacatcgcactaaaatgccctctaccgacagaaccgattttattttctttggttggcgcccttgatgtgttacgcagccactttacatactcactaatcactatcaaattttggcttgaaggtacatttggggaccaatgttcccaagtgtttctttgattgcaaaaaaaaaaaacttcacaactttataattttaaatcaaatttgataagtttttttttagtttaagcgatcctggaagtactaaatatttacattttcgtgtcgttagggtgtaagatgaaaataataaaatggaccactttgtgaattggttgaaaacgtttcatttgtttaagagatgattctcgtaaaaatgtataatgtagaaatatgatgaagaaataaacatttactgactgtaaatatgttagccttg

SEQ ID NO: 645 - DNA, 9581 bp, Aedes aegypti
atgacgactgacatttcagtggtccggtgggaccccagccagggtccagggcaggagtacatcgacgaatacgaatacgacgggggcaactccagttcacgccttttcgagcgatcacgaatcaaagctttagccgaggaacgcgagagtgtccagaagaaaacattcacaaaatgggttaattcgcatttagtgagagtcaacagtcgaataggtgatttgtacgtcgacatgcgggacggcaaaaacctcatcaaactactggaagtattatctggcgagcgattgccccgccccacgaagggtaagatgcgaattcactgccttgaaaacgtagacaaagcattgcagttccttcgagatcagcgagttcatttggagaacatcggttctcacgatatcgttgacggaaacgccagcttaaatctgggtctaatatggactattatcctgcgattccagatccaagatattacaatcgaagaaaccgacaacaaggagacaaagtccgccaaggatgccctgcttctatggtgtcaaatgaagaccgccggttaccataacgtgaacgtgcgtaacttcactacctcttggcgagatgggcttgccttcaatgcaatcattcacaaacatcgaccggatcttatccagttcgataagctgacgaagaacaatcccatccagaacttgaataatgcgttcaacgtggctgaagagaagcttggtctgacgaagctgctggatgctgaagatgtgttcgttgaacatcccgatgaaaagtccattatcacctacgtggtaacctactatcactacttcagcaaactgaagcaagaaaccgtgcaaggcaaacgtatcggcaaagtcgtcggtattgccatggacaacgatcggatgatcaacgagtatgaatcgttgaccagcgaattgctgaagtggattgaagttactatcgtccagctcggcgatcgtcagtttgccaattctctggtcggagttcagcaacaattggcacagttctccaactaccgaacagttgaaaagcctcccaaatttgtggagaaaggtaacttggaagtgctgctgttcacattacaatcgaagatgagagcaaacaatcaaaaaccctacacacctaaagaaggcaaaatgatttctgatattaacaaggcatgggagcgcctcgagaaagcagaacacgaacgagaactggcccttcgcgaagagttgatccggcaagagaaactcgagcagctcgccgcacggttcaatcgaaaggcaaccatgagggagacatggctctcggagaatcaacgcctggttagtaccgacaactttgggtttgatctggctgccgtcgaagctgctgcgaagaagcatgaagccattgaaaccgatatctttgcttatgaagagcgtgtccaagccgttgtcgctgtctgcaatgaactcgaggcagagaaatatcatgatattgaaaggattgcagctcgtaaagagaacgtcttacgtctgtggaattatctactagaactgctcagagcaagaagaatgcgtctggagttctccattcaactacagcagaacttccaggagatgatctacatcttggattccatggaagaaatcaagcagcgtttgttaacagacgattttggcaagcacttgatgggtgtggaggatctcctgcagaaacattctcttgtggaagctgacatcaacgtacttggtgagcgcgtaaagcaagtagtgcagaattcccagaaattcttgggagacgaagagggcggatacaagccttgcgatccagctatcattgttgatcgcgtacagcgtctggaagatgcctatgccgagctgtgcaagctagcggttgatcgccgatgccgcttggaggagagccgtaagctgtggcagttctattgggatatggccgatgaggagaactggataaaggaaaaagagcaaatcgtttcagctgacgagattggtcacgatttgaccacagtcaacttactgttatccaaacacagagcattggaaaaggaaatcaattctcacgaacagcagttgatgtccgtcagtaccgttggtgatgagttggttcgaaacggacactttggagctgatcgtattgatgagcgtctaaaggagattttagctatgtggaacaaccttcgggatctcacggtatcacgacgccaacgcttggagaatgctgtcgattacttccaactgtttgctgatgccgatgatattgacaactggatgctcgacgctttacgcctcgtttcatcggaagacgtcggtcgtgacgaagcaaatgtgcaaagcttgcttaagaaacacaaggatgtagctgatgaactgaaaaattacgctgaaactattgaacagttacacgctcaggctaagaatctaacattgacagaaccagaacaacaaaaagtccaagaacgtcttgctgcaatcgacgcccgctacaaagaacttatggaactcacgaaattgcgcaaacaacgcctccttgatgctctcagtttgtacaaactcatttctgagagcgatggcgtagaacaatggattagcgaaaaggaacgtatgctgcagactatggtccctggcaaggacatagaagacgtagaaatcatgaagcaccgctatgatggattcgataaggaaatgaacgccaatgcatctcgggtggccgttgttaaccaattagctcgccagttgctccacgttgaacatcccaactcagaggaaattatcgagaagcagaatcatctgaaccaaagctggtcgaagttgcgtgaacaggcagagagtaagcgcgatgatctgaagtctgctcacggtgtacaaacattctacatcgagtgtcgtgagacaatctcctggatcgaagacaagaaacgtattctcactgatactgacagcctccaaatggatttgactggtgtgatgacgttacagcgtcgcctcagtggtatggagcgtgatttagccgctattcaagccaagctaacggctttggagagcgaagccgatgccattgagggtgaacatcctgaagaggctgctttgattcgtgagagaatttctcaaatccaagttatctgggagcagctcactcagatgctgaaagaacgtgattccaaacttgaagaggctggagatcttcaccggttccttcgtgatctggatcacttccaggcatggttgaccaagacgcaaactgatgttgcttccgaagatactcctacatcactgccagaagctgagaagctgctgaatcaacaccagagtatccgggaggaaattgacaattatactgaggattacactaagatgatggagtacggtgaaggattaacctcggaaccgactcagaccgaagatccacaatacatgttcttgcgtgaacgtctgaaggctctgaaggatggctgggaagaattacaccagatgtgggaaaatcgacaagttctgttgtctcagagcttggatcaacaattgttcaaccgagatgcacgtcaagctgaagttctcctcagccaacaagagcatgttctcagtaaagatgacactccagttaatttggaacaagctgaaaatcagttgaagcgtcatgaagcattcctcaccaccatggaagcaaacgatgaaaaaatcaatactattgttcaggttgctgatcagcttaccgaaaagcagcacttcgattcagaaaagatcggcaaacgagctgagagcattgcacaccgccgggacgataatcgcaaccgtgctattgagctccatgaaaaactgaagaaccaggtcaaactgcacgaattcttgcaagacattgaagaactgactgagtgggtacaagagaaatacattaccgctcaagatgatacataccgtagcgccaagactgttcacagcaagtggacccgtcatcaagctttcgaagcggaaattgctgccaacaaggaacgactccatgaagcccaaaaagccgcccaggagcttatggttgaaaaaccagagttcaaggaaattatcgaacctaaactgcaggatctggctaagaactttgatgaacttgagaccagcaccaaggagaagggagcccttctgttcgatgctaagcgtgaagttattgtccaacaaagtgttgatgatattgattcatggatggatgatttggagaaacaaatcatcaacactgatacgggtaatgatctgacctccgtcaacatattaatgcagaaacaacaggtcatccaaacccaaatggcagtcaaagctcgacaggtcgaagaacttgagaagcaaaccgaagttcttacgaagactgctcctctggacgttgtagaacctatcgtggagaagaagacagcagtcaatgaacgatttgaaaagattaagggaccccttttggaacgtcagcgtcagcttgaaaagaagaaggaggcctatcaattccgtcgcgatgttgaggatgaaaagctgtggattgacgagaagatgccactggcaaactcggaggaatatggaaattcgttgttcaatgtgcatgtgttgaaaaagaagcatcaatcgctaaataccgaaattgataatcatgagcctagaattatgaccatttgcaataacggacaaaagctgattgacgaaggacatgaagatgcatcccagtacgccgatctaatcagccagttgactcaaaaatggcaggaattgaaggatgccatcgacaaccgtcacaaacagcttgatcaatcggagaaggttcaacagtacttcttcgatgctgctgaggctgaatcgtggatgagcgaacaagagttgtacatgatggttgaagaccgaggaaaggacgaaatttctgcccaaaatctaatgaagaagcatgacactctggaacaatcagtggaggactacgccgatacgattagacagctgggagaaacagcaagacaattgaccgctgaacagcatgcatacagcgatcaggtatctgtcaagcaatctcaactggataaattgtatgccggattgaaggatttggctggagaacgtcgcgcccgtttggacgaagcattgcaacttttcatgttgaatcgagaagtcgatgaccttgaacagtggattgctgagcgcgaattggttgccggttcacatgaacttggccaagattacgatcacattacattgctgtgggagcgcttcaacgagtttgcccaagatacggctgccgtcggaagcgaacgtgttgcaaaggctaatggaatcgcagacgacttgattcatgccggacactcagacagtgcaacgatagctgaatggaaggacggacttaacgagtcttggcaagatctgctggagctgatagaaaccagaaaggcgatgttggctgcttcccgtgaactgcacaaattcttccacgactgtaaggatgttttgggacgaattattgaaaagcagcatggtgtatcagatgaattgggacgtgacgccggatctgtctcaacgttacagcgcaagcatcaaaacttcatccaagacttgatgacgcttcattctcaagtccaacagattcaggaagagtcttcgaaattgcaagcggcatatgcaggtgagaaggcacgcgaaatcacaaaccgtgagcatgaagttcttgcagcttgggcaaacctgcaaggaatgtgtgacgctcgtaagaataaacttgccgacacaggagatctgttcaaattcttcaatatggtccgaacgctaatgctgtggatggaagatgtagtaaggcagatgaatacctcagaaaagccccgcgatgtatcaggtgtggagctactgatgaacaaccatcaaagcctcaaggcagaaattgacacccgtgaagataacttctcagcttgtttggctcttggaaaggaactcttgggaagaaaccactatgcttcagcagacatcaaggagcgcctattgcagttgacgaacagcagaaatgctctgctgcatcgatgggaagaacgttgggagaacctacagctaatattggaggtatatcaatttgcccgtgatgctgctgttgccgaggcctggttgattgcacaagaaccgtatctgatgtcgacagaactgggacacactattgacgaagtcgagaacctgatcaagaagcacgaggcattcgaaaaatccgctgcagcacaagaagaacgtttcagcgctttggagcgattgaccacgtttgagctcaaagaaatgaaacgtcgccaggaagcagcagaagaagccgaacgacaacgtttgcaagcggaagcagaagctaaggcagcagcggaagctgaggctgaggcagcacgtcaagccgaagcagcagcacgtgatacagccgatgcaccaggctcgccacattccacgaaggagcaagaatcagatcgtccaagtcccggaggagccgatgaaggcgcacaagaaggtgttcttaccaggaaacatgaatgggaatctaccaccaagaaggcctctaatcgatcgtgggataagatttattgcgttgcccgaaatggccgtttgtcgttcttcaaggatcagaaaacatcgaagactgttcctgatcaaacgttccgtggtgaacccccactagagctgaagggagctcaaatagaaattgctaccgactatactaagaagaagcatgtgttcagaataaagttgtcgaatggtggcgaattcttgctgcagtgtcacgatgacgccgaaatgaatcaatgggtaactgctttgaaagcccaatgcgagcttgacgctagcggtgaaggccgttcgttaacgttgccagcttcatcacagaaggatgaacaaaagagacggtcattctttacactgaagaaaaattaaaatctttacaaaaacatacatgatccgatatcgacacatctatgcaaaaacgattgcgataaatcagcaaaatctgtactaaacccaattggacaaccttcttctgttttaattagttgttagtgattttaagtacgtactgttcacgacaccaacaggtgaataataataaagcaaagcatatgtaatgtaaaagtcaatgcaggaaacgtaaaaagccagcacttgtgtggttaatcattgttgactaacttctcagtttgaaaacttgtcaggaaccactaatacgtttagaacaacttataaaaatatttcagcttagtccagtgaataacaagagcaagcacttagcgaatagagtacacaaatacggagatatcgcaatgagtacaatccaggtgattctggttttcgggagcttcatctactacaacaattccatcaacaatcatcacatctcattatcgagagcaaacaacacaacttttatctgtaagattttcacatctcaaagcagcgtcttcgcaataacagctactgaaatttagaactttcaatgacgtaaaaagtgtatcgtttaaatagaaaatggacgttgtcgaattaagaacatttaaacaagacaaaacgcgctccgctaaagctgatttggaaccaaataaaaaaaaaaacctgacgaaaactaattttaaaaacaatgtatatctataaaataataaatatttattttatcctagccgaaggacaaagaactcagcagaagaaaaaagaaaatctttgaactcccacaacgtcttcgatttcgtttcgtgagaaaagaaattgtaagaataagaagagtgtgacccttgcaaaatgttgaaaggccagtagatgacacctattatagacgtacagtgtagaaaacctaatttctttattttcgcaaacaaagttcaagaaataaggatttaatgtagtaatccagtcagccatggccaataacacctaaaacatcgcagagttcggaatatttctatttcgtttgaagtggtgtatagcctaaaaccaagatgaaactttagggttgcgttcttatttatatacattataccttctatagcttcttttctattacgctttgtggaatacatttatcatagtgtgaatgagttcgctttattgtaagatctagctgtgtgctttccattgtaatattaatattgcagcacaaacgattagaactatgcgggaaaaaaaaggaataccacgacgcaaccggttagagcagattatttcaatccatctcgaaggagtttgattgggttttttaaagaaagaaaacactgcaaattgcgtataaaacatactgataactgaatacatcatataaagtgttggatattgggcgttccgcttctaggaacccgttcataaagcttccacttgatcatggcgtcgaaagtatgtgcttggaaacgttatcagtatgcttgatatgaaatttctgtatattcttggtttatatgaattttgcgaagctataaagctttcccaaaattattttatttcatttcgtcttaccaatcaacacaaatacaatagtttatagctgtttatagcgaaacggtataggctggccgatgcattctatatggaggcgcaaggcagctgattgacgacgtactgaagggtcatgttaaagcttcaatatcggccgtttattcgttaattaagtaagagcactattacctatatggaaaaatgtcattgcaataaaatacacacaatgaatacaatttcaatgtttcgacaaaacgataatgtaattctaatgaaaagcttagaataaatattatattatttctgtttattttaagccgtacattatttattttttcttttcttaagaatgtactaaataaatacgaaaaaaaatcgcaagagagaagcaaaaatatattagcgcgctatgtaaaagaacatttgtttatacaaaagtataaaaatcaatcaagtatatttttaaactgccagcttgtgagtataaaaacaaaaataaacgtatggaataataatgcttataatttgtttttcttctaacgtaaaagaaagcggactatataaaaatgctaattcagtgacatcttgtggatagtcttaatattctagaaatataatgcactcacgaagaaccgtcaacatcgtaacaagtcgaaagtgcacttggaatagaaaattggatgagctagagcatttcggagcaaaaattattacattcttcacttatgtaagtgagttgtgatgttcggtacaaatgcctaattccgatcggctagtacaaatgttttcttaaaatgatatcattcttttttagttatttgaacgatccgcgtggtgatccagcagtgaaaccgtttttgattttaattaaagcgctcgtagtacatccgattttctcgcaaattgcaattttccttggtgaaccttatataaaaacataaaagaaataaagatatatttacatctacgattgaatattattttctagaatcaagtaaggcgactaaacatgtaaaaatatctggaagtcaagaattccttgatataaaaatgaaaacatcaatatttaattgttatcaaaaataatcaaatcaagatcgctactctaaaatttccaaataaaatgagacaaattataa

SEQ ID NO: 646 - DNA, 2959 bp, Aedes aegypti
atgaatggctcaagctacgaaatcaacacaaatggtgatatcctatcacagaaccagcagaagggctggtggaccatcggtttaatcaatggccaatacaagtacatgacggctgaaactttcggctacaaactgaacgctaacggagctagtctaaagaagaaacaactatggaccctcgaaccatccaacactggagaaagtattatctatctgaagtctcacttgggccggtacctctcggtggactccttcggcaacgtgctctgcgaatcggaggaacgcgacgctggcagtcggttccaaatcagcattgccgacgacaactccgggcgatgggcgctgaaaaacgaacaacgtggctacttccttggaggcacacctgaaaagctaacttgcaccgccaaagcccctggcagggaggagttctggagtgtgcaccttgctgctaggccgcaggtaaatctgcgcgccgttggacgcaaacggttcgctcatctgtcggaatcgcaagacgaaattcatgttgacgccaacattccgtggggcgaagatacgcttttcacactggagttccgcaccgatgaagagggacgatacgcactgcacacatgcaacaacaagtacctcaactccaacggaaagcttgaaaccaaatgcacggacgattgcttgttcagcgctgagtaccacagtggccatttggctctgcgtgaccgccatgggctgtatttgtccccgatcgggtcgaaggccgtcctcaagtcacgctcgcagaccgtcactcgtgatgagctgttctcgttggaagattcacttccacaagcttccttcgtcgctgcgttgaacaacaagtacgtttcggtcaagcaaggcgtggatgtcactgccaaccaggacgagataggcgataacgaaactttccagctggagtacgattggtctgctcaccgttgggctctgagaaccactcaggatcgttactggtgtctctctactggcggaggtattcaggccactggaaaccgccgttcagccgatgccctgttcgagttggtttggcatggagagggttccgtatcgttccgtgccaacaacggtaaactgctggctacgaaacgatccggtcatttgtttgcaaccgctgaagcggtcgaggacacaaccaaattctacttttatctcattaaccgccccatcctggtgttaaagtgcgagcaaggctttgtcggttatcgtgccccgggaagcaataagctagagtgcaataaagctatttacgaaactattctggtcgaacgtgcgcctaagggagtggtctacttcaaaggacaaaatggcaaatactggagaatcgatggcgaaggcatcgcagccgactcagatactccagtagatggattctacattgagctgcgagaacccacgcgcatttgcttgcgatcgaaggacggccggtacctgggagcgaccaagaacggcacattcaagctggtcgacactgggttcgatacggccacacaatgggaatactaaaaaggaaacaacattcagcggtatctcatcggttcgggttcactcgcactcgaaattttagcatattaggttactcttcgtatatatctactactactgctactattagtaatattccatcgaaaagaagcaaaattcattggaaggaaaatcatggaacgatacacgacgcaatcaatctctctcactcttttatacccttctcttcaaattttatttgtaaatttattttactgtctttcgtattataaaatgtagaatattttagagcagtcaatacaaaacggaaaagaaaaaaggaagcgttagctagtgttggagcgtaaaaaatctgataaatcgcattgttatttcaaaccaaccatcttagttcgatgcatgcgagcgtatatttattgcaatattcatacataaaaaaagctaaattagttgtattaactagtgatcactaaaactaaaaactaaatatcataaacatgagaagaataaaataagtgtaaaacataacaacatcatgcttttcttaaatgaaaaaaaaaacattatcgtcccaattcaaaagctacgcaatcaatgatttaataacgaataataagaagcaaaaaatgcttaatattttgatcaaaaggcgcaaaagtgatacactgcaagacatagttctctttgtcaaacgctttaaagtaaacgtccatcatcaaattcgaacgatttctccacccgacaaacacaaaaaaaataccgcgtggcaaatatgtgattaatgaatccatctttattgcaatgactacagatatttaaacatattaatacttcaccgtgggtgctatctctcccgcaaagtaaattgatacttaaaaccaatccaacaactgccaaacagtctgaaacgtacatttgtatgcaaaaaaacgataaaatccaatcaacagaatcaaccgcttacttttacatgcatgggtccttgagacttatttgattttgtccattgaaccaaaattataactgggatgcaaaccccacaatcaataaagcgaaattattgcaccaactttgtaaagtatttatcattagatatgagttctcaactgtggagcaactccgttagcagttcatgtaaaaaaaatactaatttattatgtttaggttcgtcgaaaagtgttctcgtgttgtaacagaccgtacttcgatgaacaacaccattgagcagaaagacgcgatgaagagaaaaggagcctctcgatttggcagacagacagacggcggatgacgcgcaggaaatgattttttatcgaccgtgcggacacgctattttgagtattttacgaatttagagaagaaaaaatgatacaatatacagaaaaataatgtaaacgtatgtgtgtaatcaaatcgaattgaagtaaaatatatcaataaaaatatg

SEQ ID NO: 647 - DNA, 3269 bp, Aedes aegypti
gaccatttttttttgctaacacatattggtcattccatggaaacgggtttcccatatgattttggtttgaacgtacacaaagaagcacacgagcaaacgttgtttgtttactttgttctcacctctcctctcacgcgttcgcgtagattcgccatattcgcgtcatcgcatcgctcctcgcgacctgttcattgcttactagatcggtacgaaaaccgtgacttctcacgggttgcttattttctttctgctcgcgtacgaaacaagatgtgcacgcgatttagaagaaatctagcactcggaaaatcgctataaacagtgttccacgaaaggttactttgatggctttatcaacggtgtagtaggtatcgcgctttcctcaaaacacccacgcgtttcggtttaatagaaagaagagggaatcaccacattagtgttttcgaagtgttgaccttgcatcgcttcttgtgtgaataaggtatatctgtagatgtctgttgaaaagtgatcccttcggaaaagtacaagcgctttctgtttgaaattctctgagaagtttgccactgaaataaaaatatgcaaatcttgacctacagtaagtgagtttatgactgtggtatttctattttggtcggatgtaaacaaaaatatctgtgatgttacgaaacgagttagagtttcaatgttaagtgagaaacgacaacgagatataaatatatactgtgtatttgatggatagaatacctatgggaaacctataaccacttgtcgaagcgagagtaaatatcagtgtatgtcgtcgcaaataatgcgcaatttgagaaaaagtgaaatcaccccagtatattcaatattattcaaccgcttagttgatgaaactacaaacagtgccaagctagagtaataaagaataaagggagaaaacgtgcatcgcagtatcgttgtctgtggcctggacgagagcatcagatctgtacagtgacatacattcaggtgctgccttagttggagttagataatttgctcgataattcaaacataatcagtcatccttacgcagataaaataaagtcaaaatgccaactctactggaagccttggaggaaaaatacggtctcggaggtcagagagacaaattggacgaagcactggtatcgatatttgtgcccaaattgccgcctagattgagcgttccagagttgctgattctcaacgactgtaacatcgataaagcgggagaaccagaagacttgcgtcgtaaatgttgcaccgtaaaagagttggatcttgcccaaaataagctggaaaattgggaagaagttttcggaattttgtctcacatgccccgcgttgaattcgtcaacctgagcttgaaccgattgggaggaccaattgacatacctccaccatgtaaaatggatcgactccgcagtctggtgctaaacaacacaaaactagagtggtatggagtggaaacccttctgcggttgcttccggttctggaagagcttcatttgagccttaatgagtatacacatgtgctgattgataccatcgtggacgatggttatgaaacagagactactactgatgaatcatgctgtgatgatacaacctgccaacaatgccaagaagaagaagaagaacaaacccaatctagtcgtggtcagaaacgtagtgcttctgaaagttctatgtacaagaaaaccgaagcgcatcctggtgtcaagaaactgcatctcaccggtaaccacatcagtcaatggagcgaaatatgccgagttggacgattgtttccgaatttggaagccttggtgctagcgaattgtcccattaggtcactttgtccacctgacgagaacaacgaagaagagcaaagcagttcaacgtcttccccgccaacgaaaacggaaagccatgagcatttcaagaatttgacactgctgaatttgagcaatgctaaaatcgattcatgggacgacatcgatcgattagcacggtttcctgtgttgaagaacctccgcgtgcagtgctggccattgtgggataaatgtgattcgacagagcacgaacgacgccagctgttgattgcccgattgcccaagatcagcattctcaacggaggggacgtgattgggtcggtggagcgcgaggacgcggagcgatccttcattcggtattacctcgataaaccggaaagtgatcgacccgatagatactttgagctagtgtcggttcatggcaagttggatccactggtcaacatcgatttgagacccgagagacgcgttaagattacattcacttacggagactctagtgaggagcgatcggtagatgtgtatagaacggttgtggatctcaagtcacgtttggaaagaatcgttgggcttccagcatcgaagatgcgtctgttttacgtcgatcaagatttgcgtgacctccaaggccttgaagagatgaaatacccccacaagcgcttgtacagctacaatattcgctccggtgacgaaatcatcattgaccaaaagcattagcagctacactgccccacgtatctatagcagagtagattttttctggaacaaacaatacagtaagaatatgaaatacacaaaacgattggactgccattgttacttgtaacgacgcaatcaaatttatgacttatgggcagctactatatacgtctttctcgtaatttacaaaacgcttaaaatagctctagtgcgtaattattgaatcgtaatttaacgccctaattatttatgcgtatccccagtgcacaaatcaaacccgtactatattaacgtattagaacgatacataattaatcagataaatggactgttgagacaatattggcagttttgaaagtagtcttcggttagacaaagtaagaagcgtacacaaactgtgagtcaagattggtgagaatggaaacataactgatgtcatatctctacttaaaatgcgattgtgatgagtgatacttgtgaaatgcgaagaaggagaagaaaatagtaataatctacaaatgtaacgaataaaatagcaattgaagatgattttatcatttctttcaaataatatcacaaccgaagaacattctaacagagagatacgcattctaattattcagatctaaactacttcatatgccagtgattcagaactaattcacttcataatcacgtcgggttttttttcatcttcaagaaattcctaaattaaaattagagtaaagtggggcaaaagttcgagtgggg

SEQ ID NO: 648 - DNA, 9396 bp, Aedes aegypti; identical to SEQ ID NO: 307

SEQ ID NO: 649 - DNA, 2658 bp, Aedes aegypti
gtagaagatcgcgcaacaatagtgttcctctgccgtcgaagaagcgcaaaaagagaaaaaacggaattcattccacttagcatttagtgaatttagttcatatctacttaagcgaaaagcaaatacaaatagcgaagagtcatggctgcgaatttgcaacaaagtggcaccctgttggatgtgctgaaaaagaagatgcgacagaccaaggaggagatggaaaagtacaaggatgaatgcgaggaattccacaaaaagctgcaaggcgaagtcatgcgacgtgaggaagccgaatccgaagtcgctgccctgaaccgtcgtattcagctgttggaggaagatctggaacgttcggaagaacgtctggcttccgccacggctaaactgtcagaggcttcggcggctgctgatgagagcgaacggattagaaaagcccttgaaaaccgtacaaacatggaagacgatagagtagcgatactggaagcacaattatcccaggcaaaactaatagcagaagaagcagacaaaaaatacgaagaggtggcccggaagctagtactcatggaacaggacctggaacgttccgaagagaaggtcgaaatgaacgaaagcaagatcgtcgagcttgaggaggagctgcgcgttgtcggtaacaacctgaagtcgctggaagtctcagaagaaaaggccatggcatcacgtgattcagtcgaagataaaatccatcaattgaacgataaattgaccaatgctgaagctcgtgctgaattcgctgaacgttccgttcagaagttgcagaaggaagtcgacagactcgaggacgaactaatgcacgagcgtgccaagaacaaaatgctccaggaagagatggaagcaaccctgcacgacattcagaacatgtaacggtggtaactgatgtcaaccgtgttactattacgcctactacgactacaaacaaactaccaacagcaaacaacacatcaacccaatcgaagatggcggaaaagatgctgaaaactaaacaaaaatgttatgggcccactagtcctcgggtgccgtgaaacaattcttccgcagacagctcagttgttctacgttgcgcatcgctgctgttactcatcgcgttttattcgcagctgtcacatctactttttgtcttgctggaaaaggagacacacttaacatactactacacccacaagtataacgttaaggaaggatctgtcacaaaacaatacacacacacacaaaaacatttaccaacgcacatacaaacaaaacattctcacgcggacacagcaaaagtcagagatatgccactggagcgagtgccatctaccggacgtaaaaccggtagcgtgcgacttgccttcgattaggtctattgtacatttacatgccaagtggacgaacattccgcgcatacattcacattcgagtttttttttcgaggccaatcaaaaaagacatttttctcttgttaagtagcaagtaggctgaacagcttaaagtttagtaggattatgaataaaaaaaactgttactgccccataactttaacattagcaattgcgcctttcaatctttctcgcgattcattattgtttatccttcaagatgcctattttcccttatttttttaatttgtcttccggttgttttgtagaattaaaaagaagtcgcgcatttaatgtcaaccaaatgcatttatttgctatatatcattttgaaacgcgaaaaacgaccactccaagtttagcgtgtatgtgtcaccgcagaattaaagcgatttttgaaatgttttcaatgataataaattgcacaaaaatacattgcaaactaccccattaagattgcacccgtagagtatttaagtagttcgaagatgccgtggaatcgatgatacgtatttgtaaaagttaaatctggaattaaagttggaataacggttcggttaggaaacgtacatcctctctcgtctccctgcgttcgtttcgttaggattttacactcgagtcctcttcttaattttagcctatttttcgtttcattctgcaataagttatcactattttttagaaccgaaaggaacagattaaatgcagagtaatttatgaaagagcagttctttttataaatagttttaaggaacaacatgagatatttctgataatgaggaaaaactttgaaatcggcggaaaatcgatcggaagatccggattggaactctgtttagttaacattttgatgtgccttcaatccgtcagttctggcaagcgattgctttttccgattgatttttcgagccgaacagaagagaagaacgtggcaaagccatttcagcgagtatttttgtcttctcttgcgtcgtatacatatactaagcgcagttaaatggtaaggaccgtgtacattatattccgtcaagtccattccatagcgattacacaaaaacacagacaggaaaaagaccagaaagagatcgaaaaatgtacacgtcaacttcacgatcaatactgttagcatttagggaacaaaagcattcatttcaacattttgccaataaaccaacaaacccaacaacaacaaaacaacagcaactataaaatgatatcatatttgagtgtttataataatatattattttatttaaagccg

SEQ ID NO: 650 - DNA, 2843 bp, Aedes aegypti
ccctaataaattcactcagaagctgatgcatggattcatccgttactcgagactcgagagggccgttttcgttttttttataaaccgctgtcatcgagtttgctgattcagtcagtcttcagtgaatcattatggcggccgcagacgttgatgtgcaaaagcacgagcttccccgtaccttgaaactgtccggccatgtcgggttcgacagcatgccggaccagttggtcagcaagagcgtccagaatgggttcgtgttcaacatcctttgcatcggggaaactggtctcggtaagtccacgctgatggattcgttgttcaacacgaacttcgaatcccaaccgagtccgcactcgttgccgaacgtaaagttgaaggcccatacgtacgagctgcaggagagcatggttagattgaagttgacgatatgtgacactgtcggctacggagatcagatcaacaaggatgattcattcaaatccgttgttgattatatcgaccagcagttcgaaacgtttctacaggaggagcttaaaataaagcggtctttgtcttcgtaccatgacagccgtacgcacatttgtctgtatttcatctgtcctacgggacatggtttgaaatccttggatctggtttgcatgaaaaaattggattcgaaagtcaatatcattccgattattgctaaagctgacaccatctccaagacggagctgtcgaagttcaaagctaaaataaacgacgagttgaggaataatggagttcagatctaccatttccctacggacgatgaatcagttgcggaaatcaacgcaaccatgaactcgcacattccgttcgctgtggtgggcagtaccgactttgtccgtgttggcaacaaaacggtccgagctcggcagtatccttggggtacggttcaagtagagaacgaagctcattgtgactttgtcaagctgcgggaaatgctcatccgaaccaacatggaggatatgcgcgagaagacacacaccaagcactacgaactctatcgtcagaaacgtctcgagcaaatgggattcaccgatgtggacagcgacaacaaaccggtgtccttccaacagacattcgaagcgaagaggagcaaccatctcgccgaattacaggcaaaggaggatgaagttcgccaaatgttcgtcgtccgtgtgaaggagaaggaggcggagttgaaggaaagtgagaaagagctgcatgcaaagttcgacaaattaaagaaagaccatgccgaagaaaagcgcaaactggaagaatctcgcaagaagcttgaagaagagtttgttgaattcaatcggcgcaagtctcagatggcagcttcccaccacaccctcacattgggcaaaagcaaaaagaaatgaaatttgtagataaccggacgaacgacaccctagaatcacacacttgggaatacactgtcgtcattatgtttccttcgcaccgcatagctgctgaccccatcaaaattaagaatgcttaaggtaggttggaaaatccgtgcttctttctatgcattgtgaactcctgaacaaaaaggaagccttttgctaaactatagttttattttaacttgatcagttcaactgaaaaatgccaaaagaccaacgtagctgcaaatcgcctagaaatactattcattcatttcatcccacttgtaagtacaaagtgttgcaaagttttaaaaaatactgttcaaatttagcacagaaaccggtaatttcatttatgcgtcacaaaatttgttaccggctaagtaagccacactggaaaatttacaaaattcaacaaaggaaattcaatactaatcagggctaacttagcaattctcatttccatttatcatcattgggttggagtcaaatctaattcttacctataattgcttctattttcaattttacaatatcttgcacatgcactgtttgtccatctcatgatgtccgccatattgagctgtaaacctcctgtaacatctgtcgaaaacgatgaaaagggttagtagttctgtacacctagattataggcgtacccaatttccacgataaacattccttttgatttaaacattatgtagaattaggtattgagattgaagcttgtcagccctgattagtattccgtgccgcgtcaaatgcgctttgcttagaccgagcgccaaccgaatctggtatctacttatagcctaataatagtaatttttaaatagcaaaaattgcatatttcaaaatcgaaagctgagcttcactccgatcggatctacgcacagttcattctcaccaacagttttacacttcggtgttgctgggtgagattttgaaaacttgtgcggtaaaaaatgcttacaacagctgaaattatccaaatagatcacacatttacgaaattacaatagaagtcatgctgtctgactacaaaaatacaccagatatacctaatggcacttacaacaattgaactagcgctaggctacaaatcctacccaaattaccatactttcacgcctccgaacatttattttttttacaaaagttcaatgttttgtaactgtattgaatgttttcagaaatacgtgcatttatgtttaattacgatttcagtgtactcaaaatgttgtacatgaatgaccttaaattccacttcaccttgcattctaatttcgatgaaaaccttggatcaaataatttcatatttatatgcgatggaaaagctaagatatattttattttaaacgttctaggttaaagtaatttcaaatagagatgtctctcccaaatatatattatgtggtctacaaatatattctgatatctaataca

SEQ ID NO: 651 - DNA, 1889 bp, Aedes aegypti
tgtcgttgtcgtagcacacagaagggaaaaaatcgggctcgagcggcttagagtagaatgccgatcgaccaccccgtacaacccctttggagcgacccgagggtgagccacgcgttacaagtggtcgccgtataaaagcttttgagcggggtaaaaccctgctcagtaacgtataactcggagatcgttctgtgtgtgtcgtgtgttctcggtcgatgctagatgctatagaagagttagccgccggtaggacatctggatattctaggttccgtggacatatttacagttggcattgagggccaaggggaacgggacaaaagtggtgtcggaaagtgattgtgcccgggagtacaatagggtgtgtcgaaatcgaagctgacccagtggatactgatcggttcaattgaatcaaaggcactcgaggattagccagccgaagtgcggtcgtgtgttagaaaaaaagggagcaaacggagtgtgaagcaatcatgattggattcaaactgctgatggtaacatgcctggtgggagtcgcattggcacagcaggattaccaacaggaatatcgcccggcccccctccgcattggcacgagtgctgcagaaccaaaaccaacgccgattccgattctgaagcagattaacaggcacaatgaagatggatcctatacctatggctatgaaggcgcagatggatccttcaaaattgaaacaaaactggcaaccggcgaagttaagggtaaatatggatacgtcgatgaggccggcaaggtgaaagtcgttgagtacggtgcgaataagtacggtttccaaccttctggcgaaggtatcacggttccaccaccgaccctagttgacgaaacaaccggcaaggatgctctgttggattatgaagacaacgttcccgctcctcgtcctcagaaaattcgtccatcgaaaccacgagcccaagaattgccacagcccagtccgcaacctcaaccacagccacagtactacgattacgaagaagaacagcatcaaccgcaactccaacaccaccaacagccacaactgcacacacaagctcacttccagccccagcctcagcagcagcctagatacatcccgcagcctcaacaaccgcaggtccaatacgtccagaactcccacttcggaccgggtgcccttgctgctgggcctgctcctcaacgagctcatatagcaaatgctgctccaatcgatgtagtctactctcccaagcagcgtcctgctcgtccagaacaggactacgacacccgaccacagaccttcccgaatgctgcaccagcccctgagccaaaaatccgctactcggcaccagctttcgcagcggctgctccagccccgcttccaaaatccaatcctgcaccacaacccgtttttgctccacagccacgaccagctccagccgtataccaaccacgaccggctcaaggtcgtagcaccagtgtcctggaccagctggcgaaggattacgcactgccacagggtggagctgcacctctgcacgacatctccttcggttattactaagacgttcttagaacactgaagtgacgtagtatttgtgtaattgcacgctggtcgatttgctttgtctagttcccactaggagagcttgccaaaacatatgcataatgccatcaaatgagaaataatatgaaaaaatgagagatcttatagcgtttctgtgtttacttgaacacacagagcaattttcggactgtgaatgatatgatagaactgataattgtatgtaattgataataaaatgttgtgaaaatataaatgtttttacttcaatgatactatccttgtttgcaaaagacaatcaagtcattgtgtggccattagtattgcagtggg

SEQ ID NO: 652 - DNA, 754 bp, Aedes aegypti
ggacgggtcgtctccaagtagaatctctgccttacgggtcgcagtacatcagctggactataaaaacgaatcgatcatcttgagttagtgccacagttcaatcagcttccgtgttcaaatagtcacagccattcctaccaaccaactaccaaagatgaagtgcttcgtcgtgtttgtcgtcgctgccatttcactgagcgtagaaggatccgtgatcccgtggtactggcccggaccagtggccatcccagctccagtgggactagcggttcctggagccacggtgatccaatcaaatccaccagcagttgtggttccagcacttccctctccagtagctgcagtgacggttgatgcctccggagttcccacggtagtcgttgctccagctcctgtaccagctgttgtggtagctgctccggctccggctgcgacatccgtttcggccacccgaggatccgttcatgttgcccctctgccaggacattccgtttcgcagcagcagttgaacctggctccggctccaggttcggaataagacaaacagcaaattagcaggggcaatgtgcaaccaaatactccaaacggactctcgcatggttttgttcaatccttcttggtgagggagcttgttccgataggtggttcggagctcttgaaccgttttggatattttttttttttgtaaatttgtttccaattgtttccacaagtactctccaataaatggcaagctaagaacacgacgacgacg

SEQ ID NO: 653 - DNA, 930 bp, Aedes aegypti
atggttttacgcaaagtgtggagtgcggttgccttcataatatgtttccaaagtgcaattgatgcagctgggatatgtggaaatgccacaattcggaagcattggtccgattgtaataagtttgtagaatgtggcgaatccagtacagtgatctttgagtgtcctgaacgcagtttcttcaactcggaaacgttggtgtgcgactttgctatgtatgcagaatgtgtcgtggacctagaggctgaagtgcagttttttggacagcagagaatgttggaatccgcaccaggagttttagttactatcgatacatgtaaccagaatcctttgggagcaaaactaccgcatccagacttttgcaatatgttctatcactgttctccttccggtccaattctgttcgagtgcccagcaaacctcttgttctgcccgaagcgaaatgtttgcaattggccccagtttgttgaatgtggcatcacagaaggggaagtgaatggggaatgtccggaaaattgcttcccagataaacgctgcccgttgaattgctatcctgatttgaatacaactgtgctgccacatccgagcatgtgcactgcatatctgcgttgcatagatggttgtgcttgtttccaaaactgcgcagctggtctctactggagtacgaatctggggcgctgtgtagaacgcgttcgatctgagtgtgtggaaatcgagagaccaggctgtccagaatgcataatgcacgaaaactgccctccggtagatgatcccaacaatcccattcgcttcccgtatcctggaagatgtgatgcttacatgaagtgtcaccaaggtcaagcttgcagagtggaatgcccggaaggccttgagtttgatccggaaacggaagtttgcgatatcccgtgggggcacaactgctgtaaccactga

SEQ ID NO: 654 - DNA, 1803 bp, Aedes aegypti
atggaagactcggtaaaaaatttggatattttgagacgggtcagcggagtcgaagtcggaagtctctggctgctgcatgatgagtccttcaaagagttcttcgactggttcggtaaatccgtaacggaggacaacctggcatcggacagtttgttgcgagagtattcagatctggaacgtaacgatcttgtgctatcggaagaggaagtacaggtcgaactagaattgctgtgcaaagatttccctaacatccttgaatataatgatgacgatgtagaaatttacgaggaacaactcgaagagctggtagccattgaagagcaatacgagaaattgttggccgatgccaagcagactgaaaagggtttaacaaaagaactgtccgaactggatatgcagcttatggatgccgaatttaaccaagggaagatggctacagaatgcatggaaaaggccagatttgttgaagagatacagtccaattcccagcagcagattttcgacatgcaccagtgttacgttcaagctcaaaatcctccgctgttcgtctaccaaatgccgatcgagcagttcaacatgaagtgcgaccagtttcttaagtatctggaaatgtacataaggaagcatttttcggtgcgcaatttagacgactcggagcacgaaccggatcagagtcaaagggacataattattcagctggaaagtatcaaatcccggctggatgtggaggaaggaaagctaacggatgccagtaaagaatttcaaggcttgaaacggatgatggagcggtttcaggacctcagttggcagcccatgaagattgaagtgatgaggagacattgttcggagttaaaatcggtaaatgagcaagacacgctccggatagatgtcctaaagcaagaactggaaatgtacattcggcagatgaatgaacatcgaatcgagtatatcctatacgaaaacagcaaactgaaactcgaccgggccatcagtcgactggagtacatcaagaagctggccgagatagtctcgagtgcgttgatgaacgccgaaatgctctggatcttgatgcagctagatctagagaagatgaagaacaagttcgacaacagtgacgacatgaatgcggaaacgcagttgtgtttaaaacgaatcgaagcgatgaaatctctggaacggaacaatgccgaagaggaagctcttgaggaactttccagccaaattgcgtcagtcatgggagcattgaatgtgagtcactcaacgtctcactcgtcgtcctcgctgacagtggcggatcgatcgttgagtttgaaaaactacttgcaagactttgtggatttcaagaagcgagcgttcaaaacgttgtcgtcgattgtgaatggaaaattctacaagaacatggatgaactgatcaaggagttgaatgcaaatgaaaaggcactgcacaaatacgtatttgatggtccggttaatagaccacagttcttcgatcagcagtatcaagagcgtatgcagcggctatcgttcgaaatggaccagatcgagaaagatctgagggcactcaagactgattatcaacagaatgtaaatgaatcgaagatgcagttgcaaaagcgatattattgtaataaatttggaagacgaaggaatcccttaggaaattgctgcaagaatcttggaaaaaatctgaaggacattaggatgaactccctcaataactcatagtaaaattcgtcaaaattacgtggagaaatttcttctgaaaaaaaataaatgttttataacaaattttacagaacaacc

SEQ ID NO: 655 - DNA, 3865 bp, Aedes aegypti
caaatcctcaaaaaccgttgctattttcgtttagttttctagttttgatctaaaaagtccctaaaaatgtgtacatttctgataaatggttagctaacagtgcttatacattcgcgcattgaaaatggacatcgatgccctgcattcggatttgcgcaaacggctcgacgtgctcggcttcaatcatccgcttccgttgggtgcaatcggaatcgtgtctgccatactggacgacctgatcaaaacgtccgaaaaactgaaggcctcgaagcagcaaatcagccaactgcaacaggaaaaagctgcctgggacctgggcgtagaaccgtacaagtgtgacaattcccgactgctggccgagtgtaacgagctgcatctggagctggttaagcagcgggacaaatttgtcctggccaacaccgagctcaagtgtcgggtgcgtaatttacaaacggacaagaaacagctggaggaacgatgcctgcaggcggaagctaaaatacgccagcttcagtgcggcgacagcaagtccaaaaaggatggtgccaatatgcaacgaaaaccatttgtttctaccgtgagaccgggccagtatcaaccgtcgacctgttgtggcgtcgagaaacgtgaaagtaaatgttgctgcccgtgcaatcaggctcgcaagacggaaatattgcacgaaatagagcgcctgcaggtcgagaccaagaaccaggaggaagtcatcgaggcgtacaaaaaacaaattgattaccgtgaccgtgaaattcaacggttgggagcattgttttccggtggtcggccggctgctgccctcgctaaggactgttgctatcgtaatgtgaacacattggcagaagatgtcaaatgcctccaggaagagaaagcctcaatgcaaaacaaattgaccgaagctttggagagccaacaaagtgctagtaaaaagattcaaaaactatccgagcgcaataaacagttagaacaagaacttaaggaaatagagaatgtcgctctgagtgtggaatccgaagctaatttgaacattttggataaggatagagaaaattccgatctacagattaggttacagcgttccaacatgaaagtcaaagagttggaaacattgttgaccgcgagaacatcaggatccactcctgtaagctcatcctcgtcggcatgctcgatagactcaactttacaaaacgcgctaaagcaagcaaatgaggaaaagcgtgctctttacaaacaactaaatgaattgaagcaacgtgagcaaacttttctaacagattatgaaaaaatcaaatcgaaatattcaaagttaaagttaaagttgtcaaaccaaattgcattcagtaccaccgactgtaatcgagacaatgccgaaatcgatgaactgaaccaaaaatgttcagctttggaaatgtccttgaaacaagcggaatccaaacgcgatcaacttacgaacgacattaaaaagctgcgagacaatttcacaaaactgaagggtgagggcatcgacaaagatcttcggatagctcagttggaaagcgaactatgtctgcaaaagaagtcgacaactagcagcattgtagttccgcctcgtttgcgtacagccgaatctgctatttccggtcaaacatcactgtcagttcaatctgcgtttcatcgtgtcgaacgtgaaagagatgctgctaagagtgaagtgcaacagctaaaaattgaaagggatgccctacgaaataaattaaaattggcaaccaaaagtcagatggacgcacaatctaaacacgaggaaacgatcatcagctacagcacacagatagcaaaattagaagccgaaaaacgagatctaatgtgtggtcaaagctcatcccagactacattgcatttactaaaagaagaaaaccgcgagttacaagagcgcttgaaggaagtggaaagcaattttagtaaactgaaagtcagccattcacaattgaaaattttgcaagaacaaaccgaaaggactatgttgcaacaccagaatagactgttctgttcggagaatcaactgggtaatgctgaagctaagctgaatcaggttgatggaaccattgaaagcgctcagaaagacattggtaaactgagaggcgacataagcgttttaaaagcgtcgaacgcttcattacaacgcgagaaggacaaactactgatggatctcgacaagaagacagagaaactttatacggtcgaagcagagttgaacactctgaaaacaaagaaagctgaaatgagggacacaatcgatcggcttgaaaggaaacttgagaacgccagtgtggataacttccagaaagacagcaacctgcgcagcgtggctacggaaaccgatacactgagaaaacaggtggcgacactgaagcgttcgcacgataacgctgttacagagaacggacgtctctcgaatgatctgagtgacaccgcttcagagctgacgctgacgaaacgtaaactagccgagtgccagaaggaagtggagcgcatgaagtcccaactacgcgaatatgttcaggagattcagcgtgccgaagagctgctgtgtatcaaggaacgtgaacgggaagagatgcttgagcactataaatctctttccgaaggagtgaatatgctcgaagtaagcaaccatacgttggaggctgagagtgccgaagccaaaaagcttcttcaggaagcggaaggacgcatcaacggattgcaagagcgagttggacttcgcgaagctgaaattaagacctatgaggagcagattaatggactgtcgagcaatattgttaagttggaaactgagatcgaatgccttaaggaggaaaatcacaatctccaggaagatttggatgcaacaaagaatctttgtaataaattggatttgcagaaggataagttgaatgccgagttggaagaacattctagcatccgcgaacagctgaataaagaaaatgcaactttgaagcgacaactctctttggctcagactggagataaagctgcagttgatggtttgcaggagctacttgctgctagtcgcgcagaagtcgagcaacagaggatcgttacgaatcaattgaaccaagaggtgaagacattgaaggcacagattgaagagttgaatctaaaattggatgaagagcaacgtaacgctgcgcgaaacgaagctctggctaatgagtatagtgttcagttacaggaactgagacgcatgattacagatgatcgatttgcacaagtccaatccagagaagaggaggattacaataggtatggtacattctgatccttataacagtcttattcacaactcgaaataatgagagacgaactgtcacgatttttgttacttgttactcatatgacaatttttcctagtgtccataattacaaaaaataattattggttcaagatattttaaaatgtttcacatttattaaatttcaaataatagttttgtcctttgttttctaattgcacacctgtgaacaatttttatgtttcaatgtgaagatgaatcgaagccaaacttaaagtttcaagagcacaaagctctataacctgacagtagttcaagctgaaactaaatcgattggtcgctcgtcattcgatcatgttttcaacttgaaccgctgtcttgtttcttgttttcggtcttcttaaaaaactacaaatatctttaattgtaatagctgtggaaaattgcatttctgatagttattgtattagccttaatactgacgtattataactgccatggatattattataattagatatgcttctttttcaatagaatcaagccctatttaaaatctgatgaatctcttcgga

SEQ ID NO: 656 - DNA, 1406 bp, Aedes aegypti
ataagtttatgtgtctgaacgtcaaacaaccgagtgttcaaattatgtttaaaaatagactactatcctcctcctattgtaagtgaatccgacgaaaaacttttgctccagacatgggttgatttgggtatcgttccgttccctgccgtgggagtaaaaatacgactgagccgaaaaaacgtatcgcatcggaaaactggtccgatattgaggacactcctatgcttgataacgtgcatgtacgtgcttctgggatggtgggggaaattggtgatggctcgtgtcgtgctgagaccccagcaaacctggggttatattgaatgaaatatgttggaatggttctcattgcgcatgaccagctgtaggaaaacctgtggccgaagaacgatcgtgcgcgctctcaaggtttcctgcgccaaattcgacttcgtacttgccaaatataactcgcacttgtttcactacgtcgtgaaccgtgattgagaatcgttcctcagttgagtctacggcgatccgcgagatatacaagacacaatggcagcagatctgaaagacgttgaaattgagaaggctcagtttgtcttttccgtttacgattgggatggcagcaacagcattgatgctttcgatatcggaaacgctctgcgtgccctcaacctgaacccaactctggaactcatcggcaaaatgggtggtacccagaaacgcggtgagaagcgaatcaagctcgaagaattcctccccatctatgcccaggtgaagaaagaaaaggacatgggatgctacgaggatttccttgaatgtttgaagctgtacgacaaggaagaaaacggcactatgctgttggctgaattgcagcacagtttactcgctctgggtgaaaagttgactgaagatgagcttgaaaatgtcttcaaggattgcatggaccccgaggacgatgacggtaacatcccatatgcccccttcctgaagaagatgatggataacatggtcgtcatcaacctcaagtaaacatttgaacgaacatcattcaataactaaatttaccaacatgtaatatgtaagagtattccatttcttcagagattgtgtgactatacaccaaaagcatattagatctattttgcaacctaaaaacatggttgcagaatgtgtttgattatgttgaaacaaaaccaaagaaacgttgaacaacatcaaccaacgtccagggaaaataacgaaacaacatcgacgaaataaataaacaatacagtaaacagcgttttatcaaacatcatcacgttaacaaaactgataatttataatgacatctagtatgggagcggttattattaatttctttttttttatgtttttaataaaagtatatgtataaagagattatataatccctggcagta

SEQ ID NO: 657 - DNA, 2711 bp, Aedes aegypti
gccatcatcatcagcatcatcatcctccgccttcagtcagttctgtccgaacagtcatacagccagggagagtaaacgcacggtggacggatcgggaaaactctgaaagatatttcgttaccatttggggcacttattagaatctaagtgctatatgggacattagtttgtgttgtgattagtcaaattatggtaaattcctgtcgaagtgcgtagtcgaccccaaagatcctagttcctagcgaagaaaaatcttgagtgctaccacactgaaccgatttcgagcgggtggtgaagaaaaccagccaagtgccacagcaggatgggtctgaaggactgtcaaatagagttggataatccctggaacacgtattatgccggccagacggtcaatgggaaggtcacgtttacattcgactcaccgaagaagattcgaggcatagtgatcaagttctcgggagaggcggaaaccaaatggagtcaaaccgaaacgaaaaccgaccaggaaggcaaacagtatgaatcgacaaccaaccttaccggtcaggaggagtacttccagatccagtactatctgctgggcggcaagaacagcaaggaaatcgatttggaggctggaactcacagctatccgttcacgtgtgcgttgccccccactcttccgtcatcgttcgaaggggaatggggcttcgtgcggtacacgatcaaggttacgctggatcggccgtggaagttcgatcaagatattaagatggccttcacagtcatctcgccggtagatctcaacgcgaatccccgagtcaaagacccattcaagttggagttggagaaaacgttctgctgtttctgctgcgcttccggacctcttagtatcatcgtgcacattcccgtgactgggtttgtgtccggacagacaattcctttgacgatcgaatgcgacaatgcaagtaacgtaggggtagaatccgttaaactggtactccgcaagttgctggctttccacgttcacactccccgtcgcgagacgaagaaaaagaaggaagtcgtgtcggaagtatccgtaggaccggtggaggccggaaacagccaaacgtggaatcagagcattcaaataccgccgctaccgccgtctaatctagtcaactgcgggatcatcgacgtcgattacgacatcaaggtggaggcagtcgtttccggtccccatgccaacctggacggaaacattccgatcgtgctgggaacggtgccgttgagcacgttccagccgccgccaccgtacacggacagtcctccggaggtggacccgtcgatggcgccaacccagccggttagcccagctagtccaccgaatggggccggaggggctctgggttggaacatcgccgatggaggcgaaagcctgtatcccaatattccgccacccacgtttgcggaagccacattcaaggcacccaacatctccaacaagaacgacagcgaatttactcgctttgtgggaccatctgagtacgctccacgctatccaacgtacgcattcacgccatcggccccaccagcggacttgtagacccttgagcacaaaaccattttgtgccggattttgctcgaacaaaaaggtgcagccaggaaaacaaatgtcaaacattttttgttacatattacgtagacatcatcactgaacaatatatatttttttcgaataatataccatattgcaacgatacgaaaggtcaaaacgcacataaagtttaaaacagtctaggaggaacaaattcaccaattcttaatattttagtactgtatcatccacttttgtgactgcaatttacttatttagagaccggagcgatacaaataaaataaattgagttaggtagtcgaacatgaaacagcagagggagtgagatagaagcaatctaactctcataaaaaacacatcacaaaatcattaaactgtctcattgttgactgcttttccctatcttatagaaaaccattatcctcatactattactactactaaccaacatataaaggtgcagcttaccgtctttaccactactaccttcctagccttaccaattttaaacagctagaagtagacaagcatagctcgaataatcaaattcagtaatttgattcggactcacatcacatcattagaaacaagcttgctaccatatatgtagcacgtagatgttatattttacgcagaaaaaaaaactaggaaactataacgacacaaatatttcactttgaacaatcgtcaatgccaaatccggtaaccagaacagaatataaactgtggataacgaaaagccgttctacatcagagtgcctaggtttcaaacgaaactagaacacaaatcagtggaaatgccaaaacatgtgaagtttgaaaataacaaataatcatcttcctaaagaagacagaaaaaaatgaatgagagttagtcaggagttgaacaaaagtgcatgataacaatgatatttttgaactttggtcaaaccacaaaatacgccacactacctgtatgtgaggacagcataccgtcgtactgtaggaaaaaaaaaatattttgctaaggaatcgaacgaacagtgagcataagcaactaagtaggagtccgttttaggtaggttgttagtagttgttgcgtatcataccaattagactggcccagtttagtatgggagaaaaataaagttgt

SEQ ID NO: 658 - DNA, 1299 bp, Aedes aegypti
atggattcaaggtttaacggcgagttggtccccgtccaaagtaagagtcgagcttttctgaagcacttcaagtatcccaaacgtgcaaccagggaaaactggatccatgacggatcgtttcacgatgcagtttctggactgctgattacggcccaactgttctcaataatgccagtttgtggaattggacagaaggatactactaagcttcatttctcttggaaaagtaagcgcatcttctactcatacgcggcatgtatgggaactgctttcctggcggtgactagtacgattcgattcgtggatagaaatttcaacttttctaggctgacgggagtctttttctatttctacaacctctacggaatgtactgtttcgtgagagttgcacagaaatggccggttctgatgcagaagtggtttaatgttgaacaactgctgccgcagagttccaacattatagaacgtggaaagcttgccaataagatcaagctgatatcgattcttgtgatcacgctctccctgatggaacatatgctgtcgattgtggcagccgtttactataccccgaattgcccaaacatcaaggatccggtcaaaatgttcttcaagtccaactttttgttcgtattctactactttgagtattcggagattcgaggattcgtggtcaaatttatcaacgtgatcagcacctttgtttggagttacatagatttgttcgtcattatcgtaagcattggactatctcacacgttccgcaggatcaacaaccatctgatgaatcataaacgagagaaaatgaccgaacagttttggggtgagcaacgtcaaaactatcgaaatatttgtgaccttgttcggttcgttgacgacgctatttcgatcattaccatgctatcgatttcaaacaacctgttcttcatctgcgcctcaattcttaacagtttgaacacccacccaaccttggtccatacagtgtacttctggttcgggctggccttcctgattggacgaactttggccgtgtccatgtgcaccgcagcagtcaacgatgaatcgcagcgtccgtttgaagttcttcgggctattccccgtgacggatggtgcgtggaagcgaaacgctttgccgaagaggtcatcaacgatacggtggccctcaccgggatgaagttcttcaacatgacgcgcaaactggtgctcaaagtcacgggttcgatcatcacctacgaactggtgctgatccagtttcaccaggacgagacggccgattacgatctgtgcacgtttaggcgtacg

SEQ ID NO: 659 - DNA, 760 bp, Aedes aegypti
acacatgtctctcaaaacaattccacttcgtataaatatcattggtaattaaatatcgtccgcagttctctcgattattcccgcagtcacaattaactcccgcaagaatgaaaagcgccatactgttgtgtctggtttcgatcagtgtcgtggttttggcaaaacccaatcccttttctaccgatagtgattttttgaaacaactggatgaagcaataactgaagtacatgctcaccaaaatgaaaccgttactgcgcaggttgaagttagcgatggtgtaaacctcacatcggaagaagttgattacgatcattcttttgaacacgatgatcaccatcatgatggagatgatttcagtcatgaagattgcgatcattctgatgaatcggtcgaatctgatgaacaccactctaccaagtcaccccaggatatccatttggcgataaatgatcattaagaattgcccccacctgaagcggatatagcacaaaatacttattgacattaacagtgattgatatctcacatgggttaaagtacctatgcagaattttcaggcatgaatttcaacaaattgaaaatgtattctcttcaatggtaattttagtaactgttagtgcattataataatcagatttatattatttccttaacagattaactgaagaaatatatttatgttgaaattttgtaatcaataacatctagagattgtgtacaataaatatataaacatattacagtgttactgttttgtca

SEQ ID NO: 660 - DNA, 1080 bp, Aedes aegypti
atgatcagtatcatacacaaacaagtatattttgcaaatccacttccaacgtatttgtttacaaaccgttccatagtgactttactcgcagtgttagatagttcaatttttcaattgtttcagaaaatgatttcattccaaactcccagtccacccaagaagaaaacaataattgttcaggaagtaaatgtgaaatttaaagccaagggcaaaggatgcacggcacacgaggctctggctcccattatattagttggccaactattttcgcttatgcccattagtggctactttcggacacccatatcaaagttaaagtttacgctaaagagcgtacattttgcgtacgggtgttttactgtatttatcatgggtgcaataatgttcatgttcttcgcattccgcattcaacgagggactttcggaattggagcaactacaacctgtatttactacgccgtgataatcacggctatgatagaattcattattctggcgcgcaattggcctttgatcatgcaacgttggacagctgacgagggtgttttcttatccaatccttacgaaacaggacagtaccttccgctggaatcacttgtgaaacgtgtggcatttacgataattttcttcgcattcgtcgaagatacgataaattttatttccgcctatttattaaatgtcgtgcacatgaaatactgcacgcatgccaccgatttttggcgaaatttctttcgtcgagagcatgcctacattgtgcggtttataccgtatcacccggcccttggggtggcgattgaggttgtgatgcgagtagctaagttcacatggcactacatagatgtgttcatcatttgcgtgtctctggtactgcagcggcgctttcaacagtataatgataggatacggactttcaatggaaaccaacagccggaggaagtgtggcgaactttgagacttgatttcctgcgactaagtgagctggtgacgtacctcgacacgaagctatccagaattatattactgtcgtgtgcgagtgacatgttcttcatatcagtgcaactgtataacatttttgagtaa

SEQ ID NO: 661 - DNA, 2517 bp, Aedes aegypti
atgaaagaaaagtttgaaatcatgacggatcaggagcattacagtcttcggtggaacaaccaccagaaccacattctacgggcgttcgacaccctactgcagaccaaaaccctcgttgatgtcacactggtctgtgccgagacgagtattcgggcgcataaggtcgtcctttcggcgtgttcgccgttctttcaacgggtgttctccgaaacgccctgcaagcaccctgtgatagtgttgaaagacttccgcggatgggttgtgcaagcgatcgttgactttatgtaccgcggtgagatcagtgttcctcaggaacggctctcagtgctgatccaagctggagaatctctacaggttcggggactagtagaccaccctgtagcaggaaacacaccaacgccagcgcagtcgccagaagacttcagtctactggactcctcactaatatcgccaacttctccgtcacttccgtcgccaaacttcagccaccaccatgcccgccatccgcatccaaattctacggcaacgagtatgttgggcgccagtactccgaagctcctgctgccaccacaggtgttcgccgatcctgccctgaatctgcccaaccctgatctctgcacatctccaatgccccgccggaaacaggctcgcccaagacgtcgatcaggtgactgtgccccacaggatctcagcagtaaacccaccagccccgttccccccagcatcgatgacaaagaagatgaagacaacgaacttgaccgcgaagacgatgaagaaccggaagaggaggatgacgacatcaaagaagtcattcggagaagtgacagcgaagacaaaaaggaccccagcccacacaaaacgccaagcaaagacgacgacaacgaaaaagaaagcaaaaataactcgactgcatcgacggctacgctctccggaatggatggacccgagaacctatgtatgaagaaatcctcatctctaagcagtagctctagcagcggaaacaactcctccaacaaagacagtagttctcggttatcggatcaatcgagtttaaaagacagccctccagaatcaacgatcggtcgactttcgctcaaggacatccgccacctgaatcgctcggcgttggtccgctcgatgagttccctgtcgcctccgccttcgtttcacttgaacaacaatcctccatccagtctatcccaccacgataagcgagtcaagctggaagatcgggacgatgatcggctcggcgacgacgacgggccccattttttagaccacatggatttagctctggccgcacatcaacaccctctggcacatctctcgcatcacagttcttcgccgcagcttcgacctccgggactaacgccagacggtgagaacaacaacagcagtagcagtaagaacaacaacaatgggaacgcctccggaatgggaaacggagccggccgcgacggaagcaccggtcccggttcgatgggtgccaaagaaggccgactgggtccgaaggatttcctgcacagtccgacgctgaattttccgccgttcttcaaccaatcggacggcggaggtcctccgaggcccccacactctccgctatcgttcccacatatgccgtcggtttcgtcgctgacgctgacgcctccgcacatgttcagtctggactccccgctgggcctcttcccgcccgggatggaccccggtaagatgtacagccccttgttggaaatgtccgacccacgcggaatgcatcacgatggcccaccgttccatttgaaaaagaaactgaaccgacccaaaggacagcattcggcgccccgcggaggaccaccccggtcctggaccaatgccgagctaaccgaggccctgcagcacgtgtggaacaagaagatgaccaccagccaggcgtcgcggatattcggcatcccgtacaactcgctgctcatgtacgtccggggaaagtacggcaagagtctcaagctggaacaactgcggaaggactgcatcagtgggcccccaattgagctgctccagatgggcatgaacaacaacaacaaggacaagaaggatggccaggacaaggatatgcctctgcaccatcccggtggaaatccgaacggaagcggtaacggttcatcagatcagcgaggacctcgctcggcgtcgtcggaaccggagatgctttcgagtccaaatccgctgttcaatccgttcccgcctgggttctatccggactttccgggcggattcccaggactaccgctgagtatgctgaatctcctgcctccggatcgacatcaccccggctcccatcagcttccgatgagcatcgacgaggactgtaaaagcgatcgatccaagcagtccatggacgacgacttcccgcaaccgttggcactgaatcgctccgggatgagtggaggaggagcaagcagtgcaaactcggatcgaggagtggacggtccgccaacggacagtcgacgggaaatctatcaacagaatggacaggactaa

SEQ ID NO: 662 - DNA, 1664 bp, Aedes aegypti
caattgttgcgccaagaacgcttaagagttattctacaaaaaaaagtgaaattcgttagttattgggcttcagtgagaatctatcgaaacatttattgagcaaatatggacactttatacatcggtaaccgaatatttgtcaattcggaacagtatccggatttttttgctggaggaattttggtgtccggcgttgatggaaaagtgacgttgattctggagtcgccaaaagacgtggatcaatatctggagtacaatgaagctgaggtatacgatttcggtgacctggtcgtgatgccgggcctgatcgactcgcacgttcacatcaacgaaccgggccggacggagtgggagggtttccacacggccaccaaggcggctgcggccggcggtttcaccacgatctgcgacatgccgctgaattcgatcccgccgacgaccaccatggccaatctgcgcaccaagatcaacgccgcccgtgggaagatctttgtggacgtggctttttggggaggtgttgttcctggtaatagccacgagctgtgcgatatgatacaggccggagtcgtcggattcaagtgttttttgtgtccgagtggggtggacgagttccagcacgttggggatgaggatctacacaaagctctgcagacgatggaaggatccggatcggtgctggcattccacgccgaggtcgagtgcaactcgcacaaccacagccactcccgcgaggacaacccaaaacagtaccagacattcctccaggctcgtccggatcagatggaagccgatgcaatcaaattggtttcacgcctgtcccagcagtatgacgtcccgtgtcacatcgtccacctctcttcggcacgagccctgcccacaatccgagaagcccgttccaacggagctcagttaacggtggaaacgtgccaccattatctgtcgatcgccgccgaagagattcccgatgcccacaccgagtacaagtgttgtccaccgattcgcgccaaaagcaaccaggaactcctgtggcaagcggtctgcgacggggacatcgacatggttgtgtccgaccattcgcccagcactcccggtatgaagctgctgacgtccggtaaggatcgtggcaacttcctcaaggcctggggcggcatttcatcggttcagtttgggctgccgctgttctggaccaactgccagcggtacggtttggaaattccagatgtggtgaggctactctgcacggaaccggccaagatgtgcgggctggatctggtcaagggacggctggagatcggatacgatggagatgtttgcgtgtgggatccggagggtacttttacggtgacaagcgatatcatcgagttccagaataaggccaatccgtacatggatcggaagttgcatggggtggttcacgcgagtttcatccgcggctcgccggtttacaggcaggaggagaagttcggacagccgctgggcaatattctgatgaagaagggcagcaggagggcggggaaggttgagaagtgatcggttgatgggagctcgcgagtatgttgattgtaaattttgtacaaagtctgataggattaaaagtattttagattgtatgatagtagatttttaagagatttttcgatgaataaattcattgttttaataag

SEQ ID NO: 663 - DNA, 1302 bp, Aedes aegypti
gctggcgactgcgatggagtgtaaacccaagtactgtatcatcggagccggtgccggaggattggcttgtgcaagacatgcttccaacgcatcagcagaggtcaccgtatttgagcaaaccgatcggatcggaggtacctgggtttacacggacaccattggacaggaccagcatggggttccaatccacaccagtatgtacgaagggttgcgtaccaacctaccgcgacagattatggggtttccggattggccaatcgagtcggatgtgtcgtacgtcaaacaggaggaagttctccagtggttgcaggattacgtggatgaattcaaattgcggaagcttatcaggtttgaacaccaagtgataagagtgtcaccgacctacaacgatcggagcaagtgggaggtgattgtgaaaaatttacggaatgagcgatatgatatatatgtatttgactacataatggtttgcaatggtcactactcgcatccgatgtttccggaatattttggcagagatagtttcgaaggattacaaattcacagccatgattatcgcaaagcagaacagttcgcaggacaagacctactcttggttggtgcaggttacagtgcatctgacattgctattgcaacggttaaagtagccaaaagtgttactatcagtcatcataatccagataaagtcgattttgatatcgagggttccattaccgtgaaacctggaattttgaaactgacatcaacgggtgccgtatttgttgacggaaccgaaaagaacgcctcgacgattatctattgtaccaggtataaatacacttttccatttttaagtgtcgattgtggaattcgattggaagacaatcatgtggaacccttgtacaaacatgtcatcaatattaatcacccgacgatggcactgattggtgtaccattctattgtattcctactcagatgatggatcttcaagcacgattttgtatgaagttcttcacaggtgagctgaagttaccgccaaaagatgaaatgttacaagacatggaagccgacattgcctatcgaagaagcaaggatataccacggaagtggatgcataaactgcacggagatttccagtggaagtattatgaagaattggctaggactgcaaatattcaaccgatcagaccagttataatagcgctttttgaggagagtatgcgcaggagagcaaaaagtgtccagcattatcgtagagataagtttgaagtaataaatgatgaagagtttcgtgtgttatgataataaattatctgaatagc

SEQ ID NO: 664 - DNA, 3720 bp, Aedes aegypti
caaaagatgatatacatgaaatatatttaattgaaatacatggcaatcctgctgaactgtcacatttgcttttcgttttctcaatcattattacgtttgacatactatcttcggatttggttgtctccatgtattaagtgacgtatggtgtgccaatctatacatgtatactacgcaaaacagaggtagaacatacacactggcagtcttcgattctatgttcattaatgtgagtcagcagtcagcacgtggatgttcaatatggaaagaacaaaaatcaatgtagtggtcatgttctgatgagttcattcatattctacgtttactatatgaaactgtttcttacgtcttgcaagcagttcctataagatcaaattcgaagtgaaagacatttttgcgttcttcctctgttaatatcttcactgctggtgtgaaaggcgagataattacatcgtatttcgatatgcttaaacaatcttaacttatttccaaatcttattaatcacaaatctattgtgagctagcaccacaacatttgagctcatgtgtcctgcataaggaaagagccagagcgttgagcattaccacatcttcaatatgtttttccttttattacaatcggaggaggtatacaatgtttttctggtgtctacaggataaagaaaaactcatgagcagaaatcctggatggaatgtatgtttataccatcgtaatattattcctgcatctaacgaatcccgctgcgatgaggcccagtacactgaatttgcaacatcaacacaatcatgacgtatccaaaaacatattaagggaagcttacagctcttggaatcaacgatctgataattgtattgtaccagaacctaatattcaaccactttttcgtgattttaaactgtttccaacttctgaacaagtgcatgacatgttaagaactgctaggttcattgtgcgtggttgcaacaaatgtaataaggcgtccaaacataaaaatggattaacattcggagaattctcagtgctgttaacagatatacgtaaaataaggcatacatccatactaaatagtcatgacaatacacagtcatctgggtataatgttacagattcctcgcaatctgtcaaagcaagcaattcggagctcgatgaccaatctacagcaaacaatgaaaccacatcaggaccagaggtttttttaggaggctcgtgtaatccaacaacttggagagctgatgtggcaatacccactctgaagaaattaggaattactttctataatccgcaagtttcagaatggactccagatctgctagaattagagcatcgggcgaaagagaaggcaaaagtgttattttttgtcatggatccacaaacaagatcagccgctggtgcaattgaggtggctaatatagcaggacgtaattctaagcaccttgttctagttcttttaccatacgcacaacagcagaagatattaaatgaaacattgacattagacgaatacaaggatctttctcgaaatcagcaattattgaaacaacttgtgcgacgaagaggattgccagtactcgataaagtggctttggccttggaacacataaaaaatatactgtctggaggaccgtgtcgagatcaaccgcaaaacattgcaacaagattgatatctgttcgacgaacttttgatagagtggtgaataatagtagtgaagtaataaatttaatccaatgtcaaacagcattggccgcacttggctatccgtctggcatagtttcgatcagcgtaataaaacaaattttagcatattttgaagaaatacgacaacaacggcctgcaagtagtacacaacctggatcaaattcaacatcaactaaaactaccaatggttatgcggacgataatatctcgataacattcgatagcttctgtgtactagaatcatatctgtccgtcctccagcaggagattctagaaacaagttgtgtttcgcccattaaagggactaatttacagcagccaccaatatatctcacagactttcaaggttggagccgccgagctcttccttcgccgatcaatacaggaaaacagttcgcagcggaatcgaacattaccagaaaccattcagcacagctatcaatatctagtgattgcaatgacacttttgaaaatgtgcatagaactagtgaggctgacgtagacaaaatcaatgcgtcatcatcgaaacatactgacgacactttatctagcacactcgataaaggatatcttggtgtaataactcagaaacatattgaagaaaattgtaacactcagcttcagcagagccaaaattcttctaaatcagcatcagatcaaaataattcaaatcattcttcgagcaacagtgagaataatggaatgaaaacgcgtgatctgtatctcggaggcagttgctggatgctgacaaattggcgacaaaactatgcaataccttatctgaaagcgaaaaatattacctttttcacatccaccttgcatgaagggcccgaatgttctatcgatttcaatgaaacgggagaaattagcataaaaggaaatgatgagcttatctttgatccagcaattttggatgcaagtcgaatactgcttttcgtgatcaccgataagaccagatcgctgggtgcaatgacaatggcggcacattacatgggactcggctataacatagtactgtgcgtacaaatgctaccaaatgattgtaaaatcaatggattacagctttcaagttcggcaatcaaagattacaacagaggtcgtgcgtatttgattgatttggccaaacggcaaaacatccctgtgtacagcaacatagaagatgccctcaaatcagcagtggaaaaattaaactacaccagatgagctataatggaaatatctacaaaatggatatgcattcagttagtttttatggatataagttatgcctcagtagagcaattgtataacattttttcatatttgatctgaatggctcgtgtcgacaaagcagtacttagttgaagcatatgatcattaaaaaaaaagtaaatctatggaaattattgaatgcatcacaccagaaaacctagctttattgaacatgctgactaaccgtttagttatggtcacagagccaactatactcttacaaacatgacttacgcttgtacataaaattattcaataacatttaattgctaggaataatttactaatttaactattatttgctaaaactacacctaatgtcaatagcatttgggtctcgaaaaaacgtcctcactctttatttagttttaataatgtaggtactgcaatatttgaaaatacaacccattatggcacagaatatacatcaagggcatccaataaagcaaaatttaattattgcaaaccactcttatcgtacagtttcatttaaacagagtaagcgtatgtaaattggattcaacaaataatttacacttcttaaatgaagatttctacctttttttccttttttatttgggtttaaatgaacaagactacctatttagacctattcatattttcaaataggtctggaaatttccctgtcaaccaatattttgattattcatgtcaaaatgaacttctggtcaaaatttcagttattttggagaaaaattaggtgtgcttcgaattacacacgatgaacagcatgagaactcagaatactgct

SEQ ID NO: 665 - DNA, 2528 bp, Aedes aegypti
atgggttgcttcggatcggccggatcgaaacagtcggattcgaacagttccgaggacacaaaaagtcagaaacggaggagcgatgcgatcacgcggcagctacagaaagataaacaggtttacagagccacccatagactgttactattaggcgccggtgaatccggcaagtcaacaatcgtaaaacaaatgagaatattgcatgtcaatggattctccgacacagaaagaaagcagaaaatagaggatatcaaaaagaatatcagagatgccatattgacaattaccggtgcaatgagcacactaacacctcctattccattagaaaagccagacaaccaggcgagagtagactatattcaggattacgcttcaggtcctgatttcaactatccaccggagttctacgagaatacagaagaactgtggaaagatcgtggtgtacagcagacctacgaacggtcgaatgaataccaattaattgattgtgctaaatactttctggatcgtgttagtgaaatcaaacagcctaattatactccaaccgagcaggatatactgagatgtcgtgtcttaacgtcgggtatattcgaaactaggtttcaagttgacaaggttaattttcacatgttcgacgttggcggtcagcgcgacgaacgacgtaaatggatccagtgttttaacgatgtcactgcaatcatattcgtgacagcgtgttctagttataatatggtcctgcgggaggatccaacgcaaaatcggctgagagaatcgctggaactgttcaaaagtatttggaacaatagatggttacgaacaatatcggtcatattgtttctgaacaaacaagacttgctggcggagaaaatcaaagctggtaaaagtaaactttccgactactttagtgagttcaatcgttaccagacgccggccgacgccgtttgtgagatgggcgaagagccagaagtgataagggcaaaatatttcattcgagatgagtttttgcgtatatcgacagccagtggcgacggtaagcattactgctatccgcactttacctgtgcggtagacacagaaaacatcaaaagagttttcaacgattgtcgagacatcatccagcggatgcatctgcggcaatacgagctgttatagatatacttaacaattttgatgcaacctggtcgtctcattttagttgtgtctaccgtaaaaatatcaaatctagccaaactttactaattttataataaaaagaaatattgattaattaataatcaaaacaaaaaaaacagaaacctatacagactaaaataaaaaaacaccgcagaataaacaaaagaatcatgagacgtacacaaagtcagtgagtgatttgcgtttgaaaccacgcatacagacggatacacttgttcaaacaatcgcatcaaggatcgatacaaaatcgcgccgtatcgtattccctacgtcgcgtgttccactaaacaaccgatcttgctgaaaaaaaagtggatcgtgttggttaaaacagtcagcggcaaaggtgacaccggataaatgattgccgatactgaataataacctgtagtcaaaaaaatcaaattacaacctatatgcacacaaaagaaaagtaacgttgagatatcatcaatcaaaaaaaaaaaaagaatgagctagaaaattcgcagttcaaacgtaattgtgaaattaatggaaggaaattgatgataccagaaacaactgcataccacacagtagtcatcgtcgttactattaaattattaatgcaaagcaaatatgtgaacgaaaaaaaaaactttgatagaaagagaagagtaatgatcggtgtgttatataacgcagagtgtatgaaagagatagcaatgattcaccgccatataaaatttaaacagacaacaatgagaaaacacacacaaaaacacaaaaatgcttacggccctttcagcgagtaaaaaaacaaataatgatgatacaagaaacatatgtgtgtgttgtgtaaacataactagtgaaatacaaagaaaaggaagtcatgtcgtcgttgtcatgctatagagtgaagatcagaaactaagtcttagtaatctgtgagctgttttctattttttgatttattttagtttttgatggaagggtagtgaatattagaggtaaacttaacaaacatccgacacaaacaaaaaaccatgcatacatacacacattgtacgagagatcagctaggataaaatcacatcatataatagaacagaaaacgacattgcacgaaagcgaggtaagtcatcgtagaagaaagaagttattgttaatagagcagaatttttcttttttttttttgtttaggagaaatgcttctaaattcgtccaaaaatgattatatgcgctcttgttgtagaactattttccagtatttttaattatcgtaatctgtatacacattttattgaataacaatgtatcatatatatttttgttttagaaaattttatcatccttgttgaatccgcttt

SEQ ID NO: 666 - DNA, 318 bp, Aedes aegypti
atggagcacaggaagatgaggaagaggacgattccggctcggaacgaacgtcgccgtcgcgttcgtctaaccaataactaccaacgcccggcgaatgaccggatccactctcgttcgttcatttgtcgctttggagttaagatcttctctcgtcttcgaaggaagcgcagggagaagtggttagggaccggcagggtgcgtactttcggggttcggaggaggaagaagcatttggtaacgcgaataccaaacaacattgtcgaggttgcagacttctcacacagaacagaaaaaatagcagttaggaaatcactttaa

SEQ ID NO: 667 - DNA, 1982 bp, Aedes aegypti
gcatgaaactacgtgagccgaacggaatgctaccagaaggataagaactattttaccacttaaaacgctagtgacgaacgaacaaaccctactacaaacagtactcctactacataaaatacaagtacctagcccccaccagatcgattctgaaaaaactttcagaatgaagaccgtttggactgtgcaaaagaacgtacaaccacaagaacaacccaaaaatcaagactttgcttcaaactgcatcgatcgaaacgtaagaaaacgctatggacctgtctggacgtcaaattcaaaactgcactcaacaactgtagaagaaacaaaagaatagaagcaatgaacatcgcccgatgacctccagactttcaagttacaccactttccgggacgagttagtaacaaaaaaaaatccaagggaaagaagacactttcccgacgagactggaagatatggtacaaatgaacgagataactgatcatactaaagttcgggagtgaaaagacgaccaactggactggcacaactgagaacgttcagaacactcacagagaattacgctatacaacgtacgcaccctcagcaacaaggtgccgcattttctgttacttctttacgttttctccatacggcagtttactcgatttcgccgaaaatttccgttattttattcattaatttttgattgtgttcgtttcgtcccaaaatattctaaaaatcatgttaatgtaaatcacattataaaattcattttacactttctcaacttcaattaataatttacaaaattacgcgattcgaatattactcataagatgcactaatttgttttaaattgtaaattaattgtagtcacattttaatgctttttgaatcacaaaaaaatgagattatacactaactcttgaattattctggcgaagacatattaagaccttatgaactggaacgatggataaactcacaaaagtaggtatattaccagcaacactattcgacgctatcgttcgctctcactatcaaaagtaacattcacattcttcatataccacaaacacacattattcgtgacttttgttttactgcagataatagaatgtagcaaccaaacagagagtacattttaactttgcaaactatgtttttatttattcgcaagctaagaaagataactgattttatataccgagattggaacaacaaagatttcttttatttttgtacatttgtattgctaaagatcatatttttacggtatggttagagatattgatagaagttttaaatactaaaccccctccggagtttaaacaatcctttagctgttaagcattacagtatcactatcattctattccatctcctcactatctctattctcaatcaaacaatcaattcaacaatcctcttaaccatcgatactgctattctttaacacgcaagagcaaactgggtaagatacgctagctgcgaacgtggcatctaacgtcaaaaagttgcaatatataagcttatttttggttctgcaacttatcccaactaaacatttccttccacgacaaacgacacagtcgtacccaaaaaaatgtggtccaattgattaatacaaacataaagaaacaaaatctagaggttcaaccaaacaaatattcatatttaggagtaagattggccaacagccgccaattcaatcatcgtttttttttcattcatatgacagagtatgtagagcagtttggacttcgggcgacagctccgtcgaaccgtgctgaacatcaaactctactgtataataatcaatagcagtataatatagacttcttcctgggtattttatatcattttgaactatgcaaaaggtgtatttcagtataactacacataacatatactattattacttttaccgcttagtatgcgcatgagtgtatcggatgacagcaacatttcagattaaataaaggaattaccaacagttttt

SEQ ID NO: 668 - DNA, 5875 bp, Aedes aegypti
agtattataggaggaccttcctgtgtatgtttgttcatgtttcgttcgtagaataattttgactgcgaaaaagagggtacatgttgtgttttgggagtgttttcttcgaaggacgattttccacttttccaccatcgattgggtcccaaatatgtcgcaaagtgggcaagaactgtgccggagttatggtttggtgtcattagttgattgaagtgcgttcgaaaagtgcaatttgaatgtggaaaattttgggacctgaacagccaatttgtccacacaacatacagaagtcgcagaggaaaagtttcgttcatttttttgttctgcctatctcccgtttgaatgcagtgagctgagaagaatcgattgtgatggcgaggggggagtgtgaagcggtgtgggcaagagtgtgatggaaaaagggcaaatgttgttcggcagcagcagcagaagcatattgttggggtgtcttttcactagatagtttttccacatagttgtgtatcatttctaaattcggtttccgtgcggcggcgagagagagcgagaaaaaatggataaaagttagaaaagctgacgggcaaattttcctaatttccagcacgttgcacgtcgaggtggatgaaattttgtccacttttttggcagcccgtccagttgttggattttccaatgtgtctccactctgtgaatctttccttgaaccctttttccccgtttgtgatgtgtgtgactattttccgggtgtttcaatcgatacgactcttcacgtttctggctaataaggatcagtgatcgacaggaaaaatgttgaaaagctattgcttttgaatcaaaaagtgcacaaagtggaagtgaaaaatccaccaggaagaagaaaaagaggaaatcccattcacaccctattgttggcaaagaagctaaaaaaacgaatgaaaagtttacaaaaagaatccactatcctacatatctcaagtgaaaacaaattatagtgaaagcgataaaacaagaagaaaagtaggcgaaaccagtgcatttccacagcattctacgactgaaaaaaaataaaacacattcaaggagaaaaagccggagcagtacaataccatttagtacaacaaagagcaacaacaactgcaagggaaatatggatcaatgttcgagcctgctggtgtctgctctgttcagcacaattatcctcagcggtttatataatccagtcgaagcacaattgcggcctcggatacaggaacatccggcagatgcggtcgctgccaaggaggaaccgctgacactgaactgcaaagctgttgggcggccccctcccgacatcaactggtaccacaatggggtgccgctggggccttctgataggcgagtggtgttacccgagggttcgctgttctttttgaaggtgatgcagaacaagcgcgaacaagatgccggagtgtatcactgtgaagcgcacaactcggcaggtgttgcagtaagccggaatgctacactgcagatcgccatgctgaaggatgagttcagagcgatgcccaaagataccgtggcattggtaggcgggccagtgatattgaactgtacaccgccacgaggcattccggagccttcggtgctgtggatcaaagatggaaaactgctggatataagcgggaaacggttgagcatggtcgattccggaagtttgatgatatctgaaattcagccaaacgacactggcaagtacgaatgctcggcgcaaagcatggcgggaacgaaaaccacgcctcctgcgtacttgaaggttctggcgccgcctactatagttaaaagcccacacgatacagaagtgctagaaggggagggatttgatcttccatgtgaattggcgggagatccgaagccggtggttacctggcgaaaggaaagtggacgtcttccagagggaaggtcgaggaaattgttggacaatacactaaggatagaagacgctcggcaggatgacgagggaaagtacatctgcgagggtcataacgagggtgggaacgtaactatctccgtctatttgtacgtctacgaagcacctacctttatggaagctccggtagatgtcgtcatcagggagggtgaaggaatcaccttaccatgccgagccaagggacgtcccggagtgcgtatattttgggatcgtatcgataaaccacatgtaaatagcagcggcagtaaaccgcaaagccaagcgcagattgcccacaagccatctgagaagtccaagcggagcatttcgcttaagacgactgcaaatcacgtacgttcctttgcaccggaatcggtgggaaattggtcaattaagatagagccggtttctgagaagcagctgtttcagctaccgcatacctcacgaatgcattccatacgaaagaagcgtgatgtgaccgaaccgagtaatgagttggatgcaatttccagtacgactgcatcattgttaatcagtagtagtgtggtacactttgaagataacggaggacttacgctgaaggcggtcagcaaggcagatgaaggttggtatgcatgtgctgccatcaacgaggccggcagtatcgtgaagaagatcttcattaaagttctggacaaggatgaatcattggaagctcgaaaggaacaaatccacacttacgaccaaagccgatgggtcagtgagcagttcatagtcctgaacaacgtgttcaccatttcggctagctccatcggaatttcatgggacgtcacggacagcgcaacaaagatgcccctgcggatgtattaccgcgtagcaagcgaaccaatggataatttcatctacaactctacgttcgaaagccaagttaccacgagcaatctgaaggaactgacgttgaacgatctgcggccattcacggagtacgaaatcttcgccagtataccggaggggttgtcagggtcggtgtccaacatccgaaggggcaaaacgctggacggaccaccatcggcgcccccaacggatgtaagagtcggagttatcaatacgacagcggctttcgtacggtggtcaccgccaccggttcacatgctgaatggagagctcactggttacaagatccaaatcaaatcaaatgccacgaacaaggtgcttggccagatgattttaaactcgacgacacaatccgtggtcatcaacagtttgactccgggagctatgtacattgccaaggttgctagcttgacatctggaggaataggaccttacagtctaccgacttctctacacatggatccccagaacattgtcaggaccgaccccactccgagctactggatgtcttcgtggatgtccggaacggctctcgtgattctttgcgtatgtctaataggtggtgcgatatttgctattttctggaccgttcgtaagaaacaatctgtgaaggcttcctatcctggtccttcggtgactacgatcattccagacaaacagcataccttatggctgcatggaaacacattggtaaagccatcacattccttggatcctccgagtacttcggaatacgccgagctaactaacaatactcacagcctcaagccaaataattgtgttccaccgccggagccatacgccactgtaacactccagcggggtggaaccatcgcagaagaatcatgcatgaaatgtgcaaacagtccagtatccagcgagtacaatgctccacttagggaaccaatcaacatatcagacgtgctgccaccaccgccagatcatccatacggtacatatcgcccaccgactagcatgacaatccggaccaatccggctgctctgtcaccgcaaatgatgcgcaagaatcacggtcctcccccaatgccgaaccgatgggacactatgccacctcccattccaagtttcccacaaaactggattcgaccacatcacatgaatccagccctaacgatgaacaaccccgagatgtattcggagaatgactacgaaagcggatccgtgttgtacgagcagtgctaccgaccggatcagatgcccccagttcctccacccaacaatggcaatcatttcttcagccacgctggcgaaccgacggaggagttctaccgtcacatgaacatggagttcgcccaggacatgggcttcgaacctgccagccctccagctccatgcccggagacgcccttcaacagtaagtatctcagtgggcccggagctgccgacagtcccatgatatctcgtaaggtaggagtcaatacgacgactcgggcacatttgcccaacagtgcgtccaataatagtaacaattacaacagccagcacagcactggccagagctccgaaagcgacagtgacaaccggtgggcacctgcccgaacgaaacgcagtagaagtagatcgaaaagtagtgatagaaaatacaatcggactctcattcgataaagttttgcccgacgctatccatacctacgctattaaacaaaaaaaaacacaaaacaagctaatcttaagctctattatacacaaaattaattaaaaacaaagtaggcagttcatgcaaaggaaaatccctatctttcttagtaggctcattaacttttacctttaaagacaaaagtatgaaagcaaagcaacattaaaaagggagctctgtaatcagtctctttctctcaatcattctcttactcactcactcttagcgctcttatctccccccaaaacagccgcggtgcgtatttagatatatggggagacacgtaggtatgagggaatcgtttaaccgcaagtaatttatttcctaacaagcgacggatgttgataaggtcggtggacggaggtacaatgcgtaatttgtgtttcggcgagggaacgatgatttgctctggattgagccgtaataaagcgtcaagaggctcagattattaataggtttagtttagttaatttaaaacgtgattcgcacaactgtaaaccgtcgaaacatattgttagtggatagtttttgtaaggtttgccaccgcatagatcgtattagtttactgaaatgggatatttgcacgtcggtcgataagccctagggtgggaaaaatgtgtatttgcatatagttttggtccagctggattttgcatatacgcctcctaataacatttttgtatatgtaacctaccgggtatcctcgtgggtttgaccgcatttaatctgaacactttgtaatttgtaccccgctaatttgcacatcgttcaacataaagatgtttcaaacgtcatacagctcatggaacggagttagggtatctcggtgttacacgccccatccgggcaatacgcccctcttcaatatttaacaaaccagattcaatatgaaattgaaaatgacaggaaatccatactattcatgagactgtctcacaatggaaatctgacagttgtaacgcgcagtaaaacagagataatgcaaaaagtatcaaaagtcgaatttcgatataatttttaccgcagtttgtttaagccagtggtcttcagcctaactgaatggacgggccagttgaatggttccaaaacatgacgcgggccgcaagttatataaggattcatgtaaacgactatttttgggatctcaaaatttattttttataaacacgaagatgagaggaagcgttgatgacgtgaaacatttgtatgcacatgaatttgaatgattccttgaacttggtaaatcttgaaaactatttgatgtagtttaaagaaattcctgatgtctccagtctttctttaaagactaggacatatttaaaccactgaaagttgaagtaacggggaagtgaagtaattttgaagcctttaccgaaccaggctttggaaaatttaacgat

SEQ ID NO: 669 - DNA, 903 bp, Aedes aegypti
ggcaaatcggacacggacataggggcggcggaatgcagtgcggcgttgaaaccatgaatgactgcgaacgatcgccgggtcgcaccggcctaagggtcaacttcaccgagaagggcgaagtgaaggagcgtcgggagaaattcctgaccgccaagtacggatcacaccagatgagcctgatccggaagcggctggccgtggaaatgtggctgtacgacgagctgcagaagctgttcgatccaccgacggaagcgatagatgtcgatattgacgaaattctcgacatggataccgatgacatcagaagatctcacctgtttagcttactgtcgacgtgcaaacgaccaccacaagatatatcgaaattcatcagcgacctgctggaccgggcgaagaccctttgagctggactggtcatttcagtttaaatttaattttaattaacaaaaaaaatattcacaagtaaggacacattacacatataaaagtaagaataataaagattattattaatggaaagtttgctaagctgcatggcgcgcattgattataaaaaaaaagaaaggaagcatagcaaagtgtgtacgcgtgctttacactgaaaataaagacaaaacgcaaacgattgtggtagaattaagcgacatctctcttattgaaaacaacaatggacttgtagtatcaattacagtgaagccgaagaacagaatacagacatgaataatttggacatttcatccgagtcatcacagttgggcaaaatttattacacatctataaaacttaagtgaatgttttaggtttagcagtagttaagcatttgattgacttccaacaggcgatcaatcggaggtgaaaatggtttgaagaaccgcttctttctaaatctcgccaccggatggc

SEQ ID NO: 670 - DNA, 3882 bp, Aedes aegypti
caatcccactcttgcgcaaagattgtctcatttcgttccagtaaatcagaaagtgtagttgacgccgcggggaaaaaacgttgaaaaagtgttaattgctatctcgaacaagacacaaaatggcggaaaccgaaacagcaccacatacaaacggcattgatactatagcggaagaggacgaatgcaacaaaacgaggccagcagatatcgaagcagatatgcgcgaaatggaacgccgcaaacgggttgaggtcatgatgagctcccgtctcttccgtgaggagcttgagcggatcgttgacagtcagatgcgtgatggaggatcgcacaacatccttcagcaactgtctgacatcatgggaatgcctgcagcacgcgtcggcagtgtattcaagagctccaactgtgttgtccccattaatgatattcgtggcatggaagccatgggatatgagaagggtgaaaaaattcttcgctgcaagctagccgccgccttcaggctggttgacttgtacggttgggcacagggtatcaacagtctgataacggctcgtctgaatgccgaccaagaactcttcttggttaatccgttcggtgttctcaaccatgaaatcacagcgtcttcactgaacaaagtgaacatgcaaggacaaattgtcgagcaggggacgaccaacttcggcgtgaacactagtcaatttacactgcactccgtgattcatgctgcaaggcccgatattagatgtgcaatatacgtcggttgcaacgcagtagttgcaatttctgctttgaagcaaggactgcttccgttaaccaaggatagtgctttgctcggagaaatttctgtacatacgtacaccggagctcttaatgaaccagaggaaaaggacaagctgctgcgaagtcttgggccagtgtcgaaggttctattgctgtcgaatcatggcgccatctgctgtggcgaaactgttgaagaagctttctacgctgttactcacattgtggcagcgtgcgaagcgcagctaaaactactgccagtggggttggataatctggttgtaatcccagaagaaacgcgcaaagcaatttatgacgcttcgcgaaaacctccggagggtgttgcatccaatgctgcatctgcagataataaggagcgttcacaggctccgaaatggcgagtgggcggtgcagaatttgaagcattaatgcgaatgttggacaatgccggtttcaggaccggatacatttacagaaatccgttggtgaagaatgatcttcctaaaccgaagaacgatgtagaggttccaccagcagtctcctcgttgggttatttgatcgaagaggaggagctattcaaacaaggcatctggaagaaaggagacttccgcaaaggtggtgaccgctctaggtggttgaattcgccgaatgtctaccagaaggtagaagtactggaaaccggcacaccagacccgaagaaaatcacaaagtgggttgcggaagcttcgccaacacattcttcgacgccggttaagatcgatagcgcaatgcaattcgtccctcctaataccaatccgaaagagtttaagcgaatccaacaacagatcaaggactaccgacgagcagacaagatttctgcaggcccacaatcgcacattctggaaggtgtctcctgggatgaagcaaaccgactgaaagatgcaaacgtttctgcaactggtgatcacgttgtcctcatgggtgcggcctccaagggcattattcagcggggctaccaacataacgcaacagtatataaagcaccgtatgctaagaatccgttcgattccgttaccgatgatgagctgaatgaatacaagaaaaccgtcgagaagaagcgacatggcgattacaccgatacagatttctccgaatccgaagcactgagctctctccaaatttcggaaaagactaagaaccagaccatgagtcctccaagccagtcagagcctgaagacactgccgcagaacaccaggtgcttagaatagaaaccaagcaagctcccaagcctagtcagcccgaagttgtactaagtgatggtgaacatgtacaaaatggcgaccactcggatactcacatgagcacgttttcacacagcagcaaagaggacgtgtcaactgaaggttctccgaagaaggataaaaagaaaaagaagggcttgaggacaccttcatttttgaaaaagaagaaggacaagaagcgaatcgaggcctaaatcacaacatgaacagcactcagcgacgatttttttataaaaagaaaaacaaccttgattatactatattatgtctttttcctgaatcataaagaaaagaacgaaacaatacggtagaaatatccgcatgtaaaggaaaactttattataaaaatatgtcactttgagataaggcgatattcctattagtagcggtaatcactctaataaggcacgcgggcacaataaaagcatttgcagatgcagtcatgtcacgtcgtatgataaaacaaaaaaaaaaatgaataaaatcggatcacgaaaaagatgtactcccctcaatagatgtagaagatgaattttattgtaaaactgttgccacaaacatcaatcaagtgcattttgttggtaggtatgcgacactacgcaagttagaacaaagttagagaacccggcttgaatatatactgacgaaggagggatattacatggcgaacgatgttaaaccgactaatagaaatacattgtgaaagtgaatctaaattacgcatgtatttgggttatctatttgaaaattattgtttatttattatctttacacataaaaacgagaaaaatacgtcactttgcagttgcagctgatgttggacgacgttgaatataattaagggtacttgtcgctgtttgtcactcgctcatgaaaaaaaaacatacaagagttgttctcgccttaatcaaaccgctatttgaatgtaagttgagaagtttgctataactgataaagaaagataaccgaaaaattatcactaaaatgggtccattcgtatgagaagaatatacagtgcatttttttctatcagacaccatatttgaccatcattttcatttttgcattttacggttattaaaaaaaagtgaataattttgcttttgtagcgataattccagttgttcattcaatcactgcagaatattttagcattatcgcatcattattatttgtttttattacagtggattttcgtccttggcgaacttcccacttatgaattattgcagtaagcattgaaaataatatatcagatatatttatagtgtaatatgtttttattatttgtttgtttggatatttttgggttttaatattgattaaatatgagacaaatgtatcaaatcctttaacatgcaaatagcggcattgatatgtgcggaagactcacatacaaatcgcacgcatcacggctttttacagcgcttgtttttttaagcggctcattaggttgctttatgtacgcagagatgctcatgtcccacaatctaccagtgttcattaacaaaaaaaaatcgaaacaaacatacattttagtagagatatgctgcccccatctaagtggctaaatatacagaaacaaaaaaaaaatgaagtgacatggcatttgaaaatagtgtgagatttgtgacgacaggtagaggacagcatcagtttccatccaacaagaggcagtttttagatttttatcagcgtaaacctggataaaacgtttgcctctctgcaacgagtaaaacaacttcgattatatgcttcaaagtgttcaagtaattaaaaaaaatcaatgatatgaaataaagcgataacatgctgattgactct

SEQ ID NO: 671 - DNA, 4869 bp, Aedes aegypti
atgagttcaaaaaatgttggcaatatgttaccgccgcagtgtgattccactaacgaaaacaacgatgtgatagacgcggatgttgctaacactaacgccactactactaacaccagcagcgccagctgcagcactagtgccgctactaccaccaatagtagccccagtacaggcacggcgagccgcggcggcgatcatacggctgcgacaatgtgcaaaataccatcggtgatcgcttctgtagagggcgctctgactaccacgaccgtgatggcatctgctggcagtgccaacaatatgacgaatagcagcaaaggcaacggtagcatcatcagcaacaacaacaacaaccacaccaacgagttcgacatgatcaatagcaacgacccgtacgccgaactcgaacgatatctggaaaaggtcaaggtaagagagaaagagtatgatatgtgtcgcattgctgaaatctccgaggtatttgcgcagctggaagcttccaaacgggcggacggcggcaacaacggttctgccacggtcaatatcgggaatggtgacttctccgttacccccgctgctgttcctgagcatggcggaaatagaaccaaccggaggacaacggtcaacagtggcagcgcccgggatagcaattacaacaccaaagccagccgttgccaaaatgtggcctgcatcggtgacacggtggacagcgtcggattggaaaccaccgagcggttgctgagggagattgtggccacgcttcctcggcagcaacagcagctgcagcaacagtctgtctcatcgccgcagcagcaaaaccatctcggctcgcgagagcggaacaacaatggtgcttttgaatcatcgccggcagtggcggcaactcgactcggctgcggagatcccacgttcatcatcaacgctggcagcgatcctccccatcatcatcatcatcatgagcatcaacggcatcatgaattggtgttgaagatcgacgaagatcacgaccacgataagccgccagagtcggagaaacggtcccagcgattcaaccataactcatcctccaacagtcgactgctcacggttggtgctcccgacaatagtcaatcgtcggattatgaaaataacacctgtagcagtagtcgggagctgcaggacagcttgtccgacgacatgagcctgctggaggaactcagcgtctacgatagtcacgagcacgacgaggattgctccgacagcaaggaagcggaaacgtcctccccgaggcaccaattccaccacccgacgtcactccaacagccgaaccttcatcatccccacagaagatccccccagtcctcgtcgtcgtttccgaacgcagacaagctgaaaaccagtacaaatagtctaccttccactagccgcaaccatagtctacaccataagtttaggaaccaccagaacgtaatcgatgccaaaagacgacagtttttcctgcccctggagcaggaaccattccagccggtcaagtccaacatcaccgatttaccgtcaccgagtagcacctcgctgcacagcgggtacaaccacctgatactggaggacctgggcaccaagagcagctcggcgccgctgctgatgaagaacgaggaaccggagattggcgagcggaggaaaatgcaccgcaggatgtccagctttcgcgagtacaagtttttccgtagcttctcagcaaaaatagaaaattggcacatccgcaaggcagaatccctctggaagcgtatgcgggaacggaaactggcagaaattgaggccattgaagcgtgtcgatggcttcgagctgccggatttccacagtatgctcaaatgtacgaagatcaccagtttccgatcgaaatcaatgacgtagccaaggaccacccgtttctggagaacgacccgctgcagtccctgtaccgacggctacaaacgctcaaccgctgtgcaaacatgcacatcgatacgcaccagcattcacatccgccgaagccgagcgaagactcggatgacgacagctgtgccctgtcggaagcttggacctttgcccacaacagccggaggtggtcccgattggaagacgctgccgggttggtcagtgtgatcaagcagaaacaatccaagcagagcgacgtcagcacggtcaacgaaaccgattcggcggacgagtcgtccaagagcggttccaagactacgactacggacgacaaggaaaactggggcgacgatggagtgacgttgagcattctgtccgacagcgatcaacaggacggtcccgtcagactacggaggacaggcagcgaaagactcaaagatggcgccaaggcactgcttcggcgggtcgaatctatcaagtcccgtcgacggaagcgacagaatcgcgatggactcatcctctgtggcccgcattcttccagcttatcacctagtcatcacaatgttgaagacttgaagcatatcgatgtgatgtctttctccaatccctcatctcctagaccttcggcggcactgggtgaccatcgaagggacaatacccttggaacgaacgagatcgtgtcgaacctactgtcaccctatactcttagtccttttgggcacatggttgaagataacaataaaaaggagcacaaacgtagcaccaatagatctagtccgttgcactttttcattcagctgcaggaagccaagtcgggtgacgactcgtcctccatctgcagcgaagacagccaggatttgaacaccggctacttcgctggaagggttgtgaagactcctagcaagaagtatcctaaggctaaaaaactgctgcgcaataaagtgaccgctgatgactccggagcgctttcggattcggagtatcagtctaagttaaggcgagctaaagtatctagtgatttgaaggagaaaagtaataatacacttcaggtttcaaagctgaaccgtggaggttcgctgaacttggggaagaactccaagcgttaccgtgatgcattccataatcgttcgatgagagtggcaaagaccagcgacgagaaggatggggacgaccggaagcgtactattgttgctagatggcatagctttcagcaacccaagacctcggaagggcgccgaatgggcattgtagacttgaaggatgacggagctagagacaaaggaaagtactcgggaggaaccagcatcgtggagatgtcctgtggacaattgctggtggtacggaaactggctttggtcactctaacaggatacatggaacgctactgcccaacgcaccgttccggctggaattgggatctgccaaagttcatcaaacgaatcaaaacaccagactataaagataagaaagtattcggaataccactagtccacaacctgcaaagatacggcaatactctaccggagataatccagatggcgctgacttggttggagctgaacgctttggaccaggtcggattattccgaaaacccggcgtcaagtcacggatagcgaaactgaagtccaccatcgagtcgggcaataatgtctccaaccggatggacgtcttcgacgatcaccacgcctatgacgtcgcggacatgatgaagcaatattttagagagttaccagacccactattgacggcgaaactgtccgagaccttcgtcgcaatattccagtatcttccaattgaagttcgagcggaggcagtgcaatcggcaattctgctactaccagacgagcatcgggaggcgttgtacaccctactaactttcctggaaaaggtcaccacaaacgcgtgtcaaaaccaaatgacggcaaacaatctcgccgtctgcttggcaccttctctattctactcaatttccgggaataggtcatctacggcgtcgccccgacggaagaagggtgctactggtcaaccggacgaaaaggaactctcggagacgcgggcatcgcacgattgtctggcttttctgatccaaaactaccggacgctgtggaccatttcgagcgatcggatgcgcaagtgtagcttcaactacatggaagagtcgaaaccggtgccgttggaatcgcttggggcggaactgcacgtgcaaaactggcgtggctatctgaccgagtgcatcaaggagtgcgtccgggaaggaaaggaaaggccacgtggttgggtatcgctcaatacctcggacccaaccgtcacggtgtacttcaagaaggtcggcgatggacatccgctgcggctgtggaaggctgtgaccgaggtggaggcccctcctaccgaagtgatcaaccacatcctgaatgaacggaacctctgggatgaccatctgctcaagtcgaggatagtggaacggctcgagagcgacacggacgtgttccagtacgtgtgtgggcaacccattaccgactattgcgtgttaagacagtggaacaaacagcaatcacgaggcgcttgcgtcatcgtcgaggtttctatcacgcataatggtgctcaactgctgctgggaggagttcgaggcgtcgtactggcttcccgctacctcatagaaccctgcggtagtggcaaatgcaaactgatgcatctatcccgtgtggacatgaagggtcgcacgccggattggtacaacaaaaactacggtcacatctgtcagcaatatctttcgagaatcaaaaagtttttcgaacactacaccgagggacctgagagcaaagtataaacacgtagttatgcaccgtcaaagcaacaaagaatcaataacatatgaagataaaaactaaacaaaaagcattataagtaattaacacagtcaaacccacacaccactaagcaaagcaacatgagaaaataagaaaagaagcaaaataag

SEQ ID NO: 672 - DNA, 2686 bp, Aedes aegypti
ctggtgttcgaacgattgaacgagaaaaaaggaaggctgcgaagttttcctcatccgtctaaattttcatttttattttggaaaggttttctcgcgagttagtgcgctttcgtggggtttcaaatcgaagattccggattcgggcatccgtcggtggtgaaattccagtccgaaatttcgtgttctggtgacgagtggaaattttatcactgtgaagcactttcgtgaggggaaagaaaaagaaggccaaattttcctgcacgacgatcatcagtcttctttgacgttgttgtttttttctgtgctagtttagtgctcccgaatccaagtagccacatccgatattcgatccgaggaggaacagaaaaacagtgaaaacaatttttcaaacagaggtttatcgaaactgcggaacagattttaaagttggggaccagggaaggaattcagtggaaataaccccaaaacaaaacagagtgtgtacaaaggccaaggcaacaaaagagtgaatattaaagatggattccgacgacgagagcttcgatgagcacgattccggaaatgtttccagtggcgacgatgactttgcaatggatgtggacattaacaatccccgggaccgtggccagcaggaggaggactacccgtttgaggtgctgacgacggaggaaattgtacagcatatggtcgattgcatcaaggaagtcaacaccgttgtcgagatccccgccactacaacacgaattctattaaatcatttcaaatgggacaaggaaaaactaatggaacgattctacgatggagatcaggaaaaactcttcaaagatgcccacgttatcaacccatttcggaaacccagcacaataaataagccaaagatcaaaaaatctggaacggaagattgcgagatttgctattcatcatttcctcccagtatgatgactgggttggaatgtggtcaccgtttctgtacgcaatgctggcaagagtacctgaccaccaaaatcgtagaggaaggcctgggccagtcgattgcttgtgccgctcatggatgtgacatactggtggacgacgtgaccgttatgcgattagttcaagatccacgagtgaagctgaagtatcaacatctaataaccaacagtttcgttgaatgtaaccgattgcttcgctggtgtacttcggcggattgtacctacgccatcaaagtacagtacgtagatgcccgtccggtcatctgcaaatgtaaccacgttttctgcttcgagtgtggtgaaaactggcacgatccggtacagtgtcggctactgaggaagtggatcaaaaagtgtgacgacgattccgaaacatccaactggattgcggccaacaccaaggagtgtccgaagtgtaacgtaacgatcgaaaaggatggtggttgtaaccatatggtttgtaaaaatcaaaactgcaagtacgatttctgctgggtgtgcttgggatcttgggaaccgcatggttcttcctggtacaactgtaatcgatacgatgaagatgaggctcgtgctgctcgtgatgctcaggaaaaattcagatcatcattggccaggtaaatattatagtagtaagttttatatggtataacctgtatcgctgtccaaacactagaaagtttccagaaaccaagagtaattgaggggcctgattgacattttggtcggattcgagttaggtatattaaaaaactactcgttttatgcttttcaactttttttatgtaactatttttttcttcaaagtttgagcaaatttatagctgttgatgaaaagctaagcttgaagcacagacaaacttaaagatttttgggaaatttattcggagatcaaaatgctgtcccaataaacttctggacacaattactaagaattgctatttaacggattcgtggaggaactaatacagatccttggagatttttttttgatttctaatttgactaatctttgatttatgacaaagtctccacgagattcacgagactttgtataaacttatggagatttacagtgaatttgtcctggcattctcagtgtgagatccttagtaaatttatggagaattttgatggatgaatatatggcaaggtccttttggtattctcgagccgagttttatttatctcttgacgacattcttgtcaaaaactttgatggattcctgggaagatacttgtttgaagttgtcattatttttttggttggatacaatcaatttttgcgagagatcgtttctatcataaagatctctccttggatccaacgagatatgtaccagatctcgaatttccacaggagccagccatgtctaacgtataattttgaaggcattcttagtagaggataggtatcttacactttgtcgatttgtgtaaaagcgatctgaatttaaaaaaattaagaagaatcacaacttatcttttaaaactgttttaaaacgtttttttcgccgtgtgaattttggctgcaataaactcgcgctcaaaaacggagtttcatgacaaaataatacaccgttttattaaattacttatgacatttttgtaccagtgtaaaatcgacttaagtagtgttttgtgttgattcgtggttgagtcattttgtctctctgtataacaatgtggtgataatagtggtttgggcgcgaaagttg

SEQ ID NO: 673 - DNA, 3908 bp, Aedes aegypti
atgcaaagtccaattaactctaagtacgcctccaaaagggactacgaacgagaggctagccgatcaggtggctatggacgcgatcgggataattctccggctggaagttcgctaaacaatggcaactacaagtcaatctcaccagacatggactcaccgcgggatcgtgatcgcgacaggaaccgcgatcacgatcgggacagagaccgtgatcggggcggtgatcggtatctgtacggaatgagcaaactgcgagacaaggaccgagatcgagattataaaaaggacaaatattccgattctctacgatcacctaaagaaaaacgaagtcgcagcgatcgggacacggaccatcggtcgaatcacgaccggcggttaaagctttccgtgtcggagaaacgcggtggatcaagttcaaattctgacgatcgcgagcgtgatcgggaacgggaacgtagtgagcgcgagcgagagcgggaacgtgatcgcgaccggttacgagaccgcgatcgggatcgtggcggaggtggaggcggcggcggaggaggtggtggtggaggtagcggaagtggcgggagtggcggaggtggaagcggtggaggtgtaggtggcgatcgggtaaaccgcgttggtgactggagtgaacatgtcagttcatctggcaaaaagtattactacaattgtaaaacggaggtgtcacagtgggagaaaccacgagaatggatggacaaggaaagttacggtttcgacaggatcatgcccaaggaccagcaccgagagtatcgagacaaagaacgcgatcgcgagcgggatcgaaatgatcgggatcgtgaggatcggtattcgtcctctgccggcagccggtccacatcgtatggcaagcattccagcagtaaaagcagtaattcgaggatacggtggccgcaacatgagtcgcacaggaggaggcatgatgaaaaccaagacatggacataagccccggcgattcaacgccaacctcggaggccaattattctcactctagcactccgaccaatcagcaggggcacagtaataacgcggccaacaacgagggtagcacagccgggacgggactgatggcaaatcagttgcctcgattactgtcgaacccgatggcgacacagagtggcattgcgatgccaccccattcgcaatcacaatcctcatcgagctacccggcatcggtgtccacgtcgtctccttccgtactgcaacaacagcaacagcaacctcacatggttgtcgggtccagtggcgacctgatgctaagctcgaatactcccggtccaccaggttcgcaacagcaccaccaccatctacaacagcaacagcaacagtgtcaacagcagcagcaatcgcagcagcaacaacagcagcagcagttaggccagtcaccacattcgtccgcgaatgcaaccgctgccagcacgaatgtgtcctcttcgtcgtcgttagccggtttgccgaaaatactttcacaaatcaccggcaacaagacgatagaacacaacgaactaaacccccagaaggcgctgcaaaccatcaacaatgcactgatgatgcaatcgaggcaacagcagaacccgaacggttccgtgtccggagctacgctggtggacggcaacgccgcggcgaacagtttaagggaacacgcgttgaactcgccgctgtacaatgtttccaacttgtcgcacccctcgacgccgatgtcgtccggtggctgtggcctcctgaaccacagcaatcaccaatccaacaatctgaactcgtccacttcgggggcaaacctgagcggtggcagcaatagcagccaactgctcagtggggatggtccgcccacgcccacccaagaaatggacctggtgttaccggaccatcggaagatggaaggtacgagcacgaccacgacaagtgccgtgagcagtctgcagggagtgatgacctcgtcccaaagtggccgatctcaaggaccgaatctgacgcccagtttagcgaagtacttccgtgccgatttgatatcccatgtgacgggatggccgtcggaaatactggaaaagacggttcagaaaatgtcggaggaggcccacattctcggtgatctacagtgcagcaaagtatcggcagatttaaaatgtgctaggagtgtagttagaataacggaaatcacggcgaccctgcaagaacagaaaattatgtatctacgacaacaaattcgtagactagaagagctaaaatcggaaaactcttttatgtctgatgatctatagcgctattaaatacaaagttaaatttatataaaaaatacagaaagccctacaaaaaaaatgactaaaactagaaatcatcctttctttttaaaggaggaaaattacactagctaactgggatgcatgttatacactgcaatataaaaccgatcgatacaaagtttaaaacatcaacaaatacagaaacaaatttaaacacaaaacaaaagaaaagtcaaagtcaagctaaaccacacatcaatgtataaagctagaggaaaatttttagaaacaatcctgctctgaaatccacggagtcgacagaatgcgaggagacgttgaaagctgaatcatggaaacacaaaaactaactaaaaacacacatacacacctacatcatagccccttccgcatactctcagacacactctcattgataattgcgcagagattcactcgaacacttacaacatagccgttggtaatttctaggatgactgaacataggaagcaaatcgtacgaatcatcaaaggatatgattttaaactgttattattattatatttatatgaaagataatgaagaataaagtttttgttctttatccgtttcaaaaatgcaactaatcagataaaaatgcatcagaacttgtttaatgttttctaaaaatgttgtaatggaaaaatattgtgcatccgagtaaacaaaaaaatacaaatcattcattcagtagcgtagagtgattgaaaggcaaaaatcataataataatcagccccgcatctccctgtctttacaacataaaacaaaacaaaagaactgcattcatgccgggaagaggacgtcggcaatatctctactacactctactagggcctcacggatgacgatgatgaatgttggaaagtcgcccttccgcgaactgtttaggtaaaaaaaggagaaataaaaaatacgatgaagaatacatacaacaaactgaaggaaactgattcacattagaagcactttctagagaaaacaagtaaaaatacaaaaaatgctaaaaagtagtctaaatattcatgtatatttcattaaactataagttatgataagaacaaaaaagtaaaagcgtaaaatcaattaaataaaaaacgttgacaaatgaaacaagagaaaaaaaagaacatcagaacaaaacgtgtatgaaggcagatgaacacatccgtttttaagcagcgcttgacgtgcgttcaatccgtcgtcgttggagcagatgcaatttttttctttctacgaataaacttattgaggaagctcttgcatgcagaataattcaaacaaacacacaaaacagaactaaaccaaccaacctatcgggaattcaaagtacatacaaagtaatctaacttaacggaatgtactaaaaaccataaaataaaagaaatttacaactcgaaacggaaagtggactgatgagataccgactgacggaccggacatacaccagacgaacggacaggaagcagcaaaattttacatctggatccatctctttgatataaccacaagaaaacatggaaacataagtcatagggaaaaaatagtaaagtttagtaatatgaaataatacaacaaagtatatttaaatcaaagtgg

SEQ ID NO: 674 - DNA, 3948 bp, Aedes aegypti
atggccacactaattcccacgtctcaacccaccggggttgaggcgtacgaggacatgttcaaggagatcacccgtaagctgtacggggacgaatccggccatggcctctacccacacaacacccaagtagcccaagtggctcaactagcttcgggtgcccctgcggcccccgaaggaggcgaacggtccttcaccacactggtatcggaccgcaacattgcgcaaatcgattacgaaaccaccacggtccagatccagcaacaacaacagcagcagcagcaacaaggcggtggaactcaacagcagcaatccggagggaccttcaaatccgaagagcatcttacgacggctttcggcttggcggcgctcatgcagaacggattcccgccaccgggtgccatcctgaatccggtgaactttccggtcggcaccacgctgaaaccaagcacaaacattgccattgctacggcggacgatcgctggcagcaacaaacccagcagacccaacctcaagaccaacaacagcaatctgtcggacaggatcacacgtggacgcccaacggcaaacaatcctcgtcgtcctcctactcacagaaagcattcaagaaacccaagatcgagccccaagatggttccccaacgggaaccattggcaccgtcagtacccttaacattccccaaaccggaagcgacaagaacaaggccaactttggctcggccgctgtcggtgcggccaccggaaaacgctacagctgcacctcctgtccgtacacgacggaccggcgagatctgttcacccgccacgaaaacatccacaaggaggaaaagccattccactgctatgcttgcctgaagcagttcaatcgggcagaccacgtcaagaagcatttcctccggatgcaccgggacatggaatacgaaatcgccaaaacccggaaatcggtcaacgccaagaacaactactacaacaacaacacttcggtcagcagttctggcaataacgctacggtgtccacgaccgttacccaatccttggcgccccagcccaccacaatcatccagaccagcaacaacacccttaacattcccacggcaacgttcccaacgcaaattaccattcctactcatcacggtaacaccatcgagcacaccgtaagccatgacattgccaccctcaacggcgttgtccaccatgtccagcaacagcagcaacaacagcaccaacaccaacaacagcagcaatcggcaccgccccctcaccagccgacgcagatcgtcctcggccccccgattgtgaccatcaagcaggagaagggaggggccatcactaccacgacgacaaccgccacggctgcggccgttgccgcagctaccgccatcgtcaacaatagtgctcaacaacagcggggggatatcgtcgccaccgttgggcccgaggagctgctccccaacgacgacaaatcgctcgtcaagaagctgaagggcgagaaacggttcacctgttgctactgtccgtggtccggtgccgacaactggggtctcaagcgccacctgaacacccatacgaaaccgttcgtctgcatgctgtgcgactacaaggcggcccgctccgaacggttggccacgcacgtcttcaaggtgcacaacaaaaaggcctgcaacaagtgcaactactttgccgacgacgaaacccagctcaacacccatctgctggaggcgcatcctcacgatgccaacaagccgcaaccgaaaacgacgacggttgtgatccaggccagtggcggcaatgggggtgtcgttgttacgcaaaatcccccgactgtgttgacggcggtcgcaaccacatccatccccaccagcaccgggacgggaaatgtgctacggaatctagggaacaccttcgttaccaataacgtccccggaagcgtcagtgggaattccttcggaacgaccaccaataccaacatctaccacacgatcacgacctcggcgacgacggggaatatccttaccaacagcaacgcatcgaacctgatcgacacgatcaacgcccatctcgctcagcagacagtggcgaacagcgctgctgctggtggtggtgcaggcgtcagtaccgttatcaatccgggaaacggaataggtggaggggtagcgcaggtagtcatcacaaatggccagcagcaccacctccaccaacaacagcagcaacaaccacaacagcaacaacagcagcagcagcagcagcaacagccgcagcaatcaacgctccatcaatcatcacaatctcaatcacaacctcagcagcaacagcaaactacccaccactggatagcaaaggtcaaccgaaagcgaggagctgagctcctctacagctatctggaggcggacggaagcgactcggaagattatgcccgcttactcaacatgcaagcgatagggcgcaacaaagcttccgtcacgcaggattttcataatgcgggaggcggaaaccagcaccaccatttcagcaacagccacagcagtactaacggaacgaacaagctatcgctcctggtagcggcgtcctcgtcggcatcctgctcaccatcgggatcaccttcgccaccgttgtcccgtttatcaccgccgacgatggttccgctctctaccactactaccactactcaagctggtggcggtggcgccaaaattcccatcgccaatgggatggccatggccaacctgactgaggagcatctctcgttgctccaactgttggccacggccgccgttgctcaacagcatcttcagcaacagcagcagcaactgcaacagaagaacgcgacatcgacatcgattagcacttcgcctcccgcgaatcatcctcaccaacaaccgaacaactataaccaccaccagaatagtacaaacagcaacgtgaccagcgatccggcgaacaataacggttccaagcagcgccgtcgcaaaagtagttcccgaaacgacaaggagaacctggtccagcgtcatccgaccgccaccgtcgtcccaggcggcaaggtcatcgatctgaccaccagcagcaccacccacggaaccaccaacgggcccgcggaaaacggaattgaacggaacaacaacggtagcagcaacaataacaatagtagcgttaacaataagaatataaacgaagctatttttgatagagtgtataagaaaccgtacaatatgtttttatcgagtgcgttctgcaagccttcgccgatcgagaaggacagagcggcgcccaaggacgaaaacttctccctatcggagttcctccgcaatcacaaggaagtctcgatcagcacgctgtccgatgtgcgccccgttaaaccacgtggcgtcgctttggacggtggccctgtcgacgaagacgacgtgatcttcatcaaggaggagaaacgactcggccgcaaacagcagcaaccccggcgtaatctagcgctggacacggaactgaatgccacgccgctgaatatcagttacaagccaccatccggcacgacccctgatcgaccgcaaatcggcgacattcgggacaagcacatgatccgtttgatctcgcggaagctctgctgtcgcatctgccagaaccagcagcgtttggagcacatggacaactgccactaccacagcaagacttcgttgatcctgcacaaccgctggcgccatggctcgtggcctcgaacggaacagtgcaaactgtgtcgcgccagtttcgaccggaagtacaagcttatcttgcatctgcggttgcagcacaccaggcgccggttgtcccagttggccatgaagtccaaatccaagtccaagaaggcgtcatccgggcataaacgaaaggctacatccggcaagaagcaacaacggaagcggaaatcgaagagccgatccggttccaaacatggcaccgtcaagcgacgcaagtag

SEQ ID NO: 675 - DNA, 690 bp, Aedes aegypti
atgcttcttctacactgttgtacacaatacgaatgcgtatgcaagcccaattattgcgaccaggaatgtccagcaaacaaaatacctgcaaatacaaccaatcccaccgagcaatttggagtccctggtaaatgttgcgttccctgcaaggatagctattgcatacatgataggaagtatcacaagcatggcgattggtggcttgctgatgagtgtaccaactgtaaatgtgaatacggaaaagtaagttgtcagatgtcatcgtgtaagacgccaaattgtcttaaatacaagctaattcccggagaatgctgtcctgtttgcgatgaagatggcatgaacttttgtgcagacgtccagttctgcaatatccactgtaaatacggttatcaacgacagggcaattgtgatctctgccaatgcgctagaccaccaacgaacgaatcagtacacacaacagtggcatatcctgaagtcaaatcaactaccgtgaattctactgatagcattgaagacattgaggatatagttcgaaaaggtccacatcaaaacaactcatacgatgaaatgttaaatccattttggatttattttatggcgtgtatatgtcctctggtattcattgtaggaggaattattgtgtggtactatcgtcaaaataacgcaaagtacgacgctgtacaagtatag

SEQ ID NO: 676 - DNA, 3299 bp, Aedes aegypti
atggtagtggcctcgaccagccatggaagcagcagtacttcgagttcgaccatttcgagtcaatcgcggagttcgcagccgaagcttcatcaggtgggtgccgttggcaccgggatgaccccgaaagagctgtcggacaatgacgatctcgcgaccggcctggtgctggatccgatcctgggctttcagacgcacaagatgaacctcaagtaccggccgctgcgggtcaacaccgaccccatcaaggacatcctggaggagttcatccggtcgcagaactacgcccgctgctaccagcagctgatgaaagggaactggatcccgcgagcggtgctcaacaagagcaagctggcccagaagcgactggaagcgcacatataccgctaccttcgggtgttcgatcgcaacgcgggattcgtgatagaggcgtgctaccggtactcgctggaaggtcagaagggcgccaagatctgttccacgcgcaagtggctgaagaacgagaagatcgaatgcttggtgggatgcatcgccgagctgacggagaaggaggaagacgcgttgctgcagccgggcaagaacgacttctcggtgatgtacagctgtaggaagaactgtgcccagctttggttgggaccggccgcctacatcaaccacgactgccgagcgaactgcaagtttgtggcgacggggagagatacggcatgcgtcaaggtgttaagggacatcgaaatcggggaggagatcacgtgtttctacggggaggacttctttggggataacaatcggtactgcgagtgtgaaacatgcgaaagacgagggacgggcgcgtttgcgaaggacaagaacggcgaggagcagagtcctaatggagtgcgataccggttgagagaaacagacaatcgattgaaccggttaaagagcaagaacaacgctctggacctgtgtaaaaccagcatcggtaagagcgaacctccgtctgcgttggctgcccttagcatgaaggagctacgcgaaaagggaatgaccaagtacgacgcagagatgctactggcgcagcagaagccttcgttcgaagccgttcgaccggaccaatcgacacaggaaacggatctgagcagtagcacaactccagctgaaccttccgatgagaagaaagcgaaagcaaagcatacgccggatgttacatcggagaaaatggcaacacgctcttcccgtcgatttcaaaccccaaccgaagagaagaagtcccaacctgctgcagcagctacaacggccagccatccggaggcgaccacaacggaggaagcatccactcccgtcccgttgaaagccacccgaagcacgcgacccctacgagagaacggccgccgaaggtacagcagcaacagcagcctcaatacggacatctccagtgtcctgtcgtcgacgtcttcgttcgtaacggccaagacttcggtcccgacggctgccgaacggaagatgatgcctcgctcgatgaagctcccttccgtatcgcacgaagacgtcatcgtaatcgacgacgaccacaacagcaatcactctttcgcatccaagagcagctgcagtaccatctcggccctctcgtccaaggaacaccttcaaccgccaaagaacaaccacaacacctgcagcagtagcaacgacaacaacgtctatgtgttcaatgatctccttgaaagtaataatctaaacggttacacgctaagaaatcaccacacccaccagcaggagcagaagcagcatcatcatccgccacaggaggaacaacgacaggatccatgttccaccgaagcaccaccaccggaagttgtggaacgaccgccgtcggttaagagacgttccatcaccgcagcaaggcgttccatcacggagcacatcagtccccgcgtgacacggcggaagcagcgtttgctcggcatgcaactggtatccgtgaccgaagctacagcaactgcgaaaacctcatcactgccagacgaaacggaaaagccacaaaccccaacgaaaacgacgacgacgacgactaccgagagggcagagactgctacggatctcacatcgacaagcggtggcgacggcggtggaagtagcggtgccagcggaggactcagcgatagctccaaccggggcaaccggcggaagcagaaactgcagacccggattatgcaagcggacgagctggtggccctgcaaaggcaagcggccgaactggagcgaatcgcgcgggcatcgctagggcgtgtcccgcggcgactcgtactggacgacggcacaaacgaggccgaagatgaggacgatgtgatcctgtcgaaagtaaccaattgtgatgatactaatgataagttgttaagaagtagaaaccggcatgaagatgttatcgttctaagcagcggcagcagcagtagcagtagtagtagtgaaagtaatagtggtaaatctagtggtaggaacaatggtagcgctagtgttagtaatggaaacagtgatcgtgtggggaccgagccgctagcttcgaagacggtgatcgggtcgcgaaagcgaaaagtatccaaaagtgtcagcgaatcggagagcagttccagttgggagaataaggtacccttggagcagcgcctggtggaatcctgtctgagcaacataccgaaccaggaagcattgctcaagactccggagagacgtttgaagctgacgctccgcatgaaacggagtccggtgatcgacgaaattatcgaatcaggtatcgccaaacatcgaaactttctacgagttctgctcaactccagcaactgctagcgaaggctggcgtcaacgcaatcccaaaaaaaatccccatgcacgcgatcactgctttcgagttccagagttagtcgtcggtctcggacgatatttgcaaactaagctttcgatttcggaaaaaagttcccgttcgtttcattgtatggaaaaaaagttctctttattttcgaaacaaaattgttatggtttcgtttggaaactgaccccctcccaatttttccccatatatgtcgcaaagtgcgtccgtacacgcagtaactataaattattattcgctaatttccaactaaagagagagagagagaaagcgagatcgagaatccccctcccaagcatatagattaaagtgtatgtatatgtatgtgtattcggtacgcttgtgcgtacgaggttaggcttaattagttgtcatttacagttatagtttcaaaagcatacattcataagcccaaaaatggaaacaaacaaaacagtaaacaaac

SEQ ID NO: 677 - DNA, 1446 bp, Aedes aegypti
ttggtgacaaaccagtgtttcattgcgagctttgcccgacaacatgtgggcgcaagacagaccttcgaatccacgttcaaaagcttcacactcccgtcgaaaagcctctcaagtgtcggcgatgcaacaaaatctatcaggaccgttacacctacaaaatgcataccaaaactcacgaaggtgaaaaatgttacaaatgtgacctttgtccatatgcttcgatttcggcgcgccatctcgagtcacacattctggtgcatacggatcagaagccattccagtgtgaaatgtgcgaacaatccttccgacaaaagcaactgctccgtcgtcatattaacctatatcataatccggattacgtgcaaccgactcctaaagataaaacgcataagtgtcctaactgcccgcggtcgttccggcacaagggaaatcttattcgacatatggcgcttcacgatccggattcgtctgcacgcgaagaacagctcgctctcaaggaagggcgccaaaaacgagtgaatatcactttggaacaggtggatgaatacgaaggcgaagaagacgaagacgaggaggatgaggaagacgaggacgatgatcaggatgaagtgatgacggtcgagggcgaagatggtcagtatgttgttttggaagttatccaactgcaagacgaggaggaacaaaaaccgaaaataactacggacaaacaagtcgtttttgaagaagttaacattccggaggatcgagacactctagaagagtccaatgctgatttcattctaaacgaagatctatccgacgaaatgcttatgagtacgcttcaaccaccggcaaaaagggcccgttacggttcactccacagtacctcagtatcacacggtaacgatattgagaaagatatgagcaactgtttcggatttgatgacgatagtgatgatgaaggtaaacccaacatcacctgctcaactagtgacctagatgatagtcatcatcaatagggctttcaaacccaaaattcatcttccacacgcatcagacgcctgcaactgtttaccctcgaaaaatattggtgaataatcgtgtcagttctatagcatgaatgggaaatcaactgatctgaaataattcctaacaccaaatatgacaaacagtcatataggtagccagaataaacaaccagtctttagttcagattatttcgcccggattttgaacatgcctagtcagaatgattataatgggcacttcgtaaacgctttgtattttattttagattctactaaattgtaagaggattgtttgccatctgcggctagctaggtttgtataatagaagcagatagttgctgctcactcttaccgtaggctttacaacgttccaaatgcgaaccgttagaatacagtgtaaatttgttaaaattgaataaacctaagttttaatacatt

SEQ ID NO: 678 - DNA, 2290 bp, Aedes aegypti; identical to SEQ ID NO: 335

SEQ ID NO: 679 - DNA, 7683 bp, Aedes aegypti
attaataataaaggatcaccgatagactacaaaacgggttcggcctgttcaaccccaacgaaggacacgctcaagagctacgaccgcaactgcatgggtccggtacttccaccgaggagcgccatgtgtggtccaccgtcacatcactactcagccccgctgaacttccgcaaaggcttcaccttcaccaaatgtacatggaagtgtacggctatactagttgtattattatgtgttatactggttataacattactattaacagcatctaacgtattaagtatatcatatcctaccaacaatccctgtacagttctagtcgatgaaaaagcggaaatctctgcagccaaaagtacgatagcggacgcgaaccgggcgacggggcctggaagcatcggggcgttaccagggcggcctaacccgtccggcagtgcgggagattccgcatcgctaagttcagcttccgcatccgcgtcctcgtcttcatcagcggcatcaaccgcgtcggccaacagcaatagtaatgcgaacaacaataacaacaaccagaacaacggaggtacagtaatcaccaacagtaataatcctagttcccacaattctacctctactaccatcggtgatggttttacggataatggtgttagtgcacgaacatttccggcacggagtttccccccggatgggaccaccttctcgcagatctcgctcggccaacggctatccaaggaaatccccccgtacagctactggaacatgcagttctaccagtcggaaccggcgtacgtcaagttcgactacggtatcccgcggggcgcctcgatcggggtgtacgcccggcggaacgccctaccgacgcacacccagtaccattttaaggaggtcctgagcggattcaacgcccggcagacccgagccacccatccctcgatgcgccgtgaagtgactcgctacatggaacccggccactggttcctgtcgatctacaacgacgacggagacgcccaggagataacgttctacgccatcgttgcggaagacatgacccagaactgccctaacggatgctccggcaacggccaatgcctgctgggccactgccagtgcaatccaggctacggaggtgatgactgcagcgagagcgtatgtccggtgctctgttcgcaacgcggcgaatacatcaacggcgagtgtcagtgtaatcccggctggaagggcaaggagtgctcactgcggcatgacgagtgcgaggttccggactgcaatggccacgggcactgcgtcagtggaaagtgctcgtgcgtacgaggatacaagggaaaatactgcgaagaagtggactgtccccatccgacctgctcagggcatggcttctgtgccgagggaacatgcatctgcaagaaaggctggaagggaccggactgtgccaccatggaccaggatgcgttgcaatgtctgcccgattgttccggccacgggacgttcgatctggacagtcagacgtgcacttgcgagccgaagtggagcggcgaggactgttcgcaggaactgtgcgacctgaactgtggccagcatggacgttgcgtgggcgatagctgtagttgtgatgctggttggggtggcgaattctgcaacagcaaattgtgcgatccgcgctgtaacgagcatggccagtgtaagaacggaacgtgcctgtgcgtcaccggctggaatggcaagcactgcaccttggagggctgtcccaatggttgctctcaacatggtcagtgccacgtaagtggagaactgatgtgggaatgccgttgctacgaaggctgggatggtccggattgttcgatgccgttggaacagaactgtggcgacaacaaggacaatgacagagatggccttgtggactgcgaagacccggagtgctgcggaagccactcgtgcaaaacgagtcaactgtgcgtttccgccccgaagccgattgacgtgttgctccgcaagcaaccgcccgccatcacggcgtccttcttcgagcggatgaagttcctcatcgacgagggcagcctgcagaactacgccaagctggaaacgttcaacgaaagtcgatcagccgtcattcgaggccgtgtggtgacatcgctacagatgggactggttggagtacgtgtcagtacttctactcccctggagggcttcaccctaactcgtgacgatggatggttcgatttgatggtcaacggaggtggagctatcactctacagtttggaagatcgccattccgaccgcagacccgcattgtgcaagttccatggaacgaagttgtcattatcgaaaccgtcgtcatgtccaccatggacgacaaggagaaaaccggaccacctcatacctgcttctcgcatgactacgactcgatgaaacccgttgttctagccacgtggaagcatggtttccaaggagcttgcccggatcgcagcgccatcctggcggagtctcaagttgtccaagaatcgcttgctattcctggtactggactcaacttggtctaccacagtagcagagccgctggatacttgtcaacgatcaagttacaattaactcccgatgtaattccacccactctgaagctgatccacctacgcattaccatcgaaggcattctgttcgaacgagtcttcgaagctgaccctggaatcaaattcacctacccatggaacagactcaatatctatcgccaacgagtatacggcattaccacggcagtcgtcaaagtcggttatcaatacactgattgcaaagatatcatctgggacgttcaaactactaagctcagcggtcacgatatgagcatctccgaagtgggaggatggaacttggacattcaccatagatacaacttccacgaaggtattctgcagaaaggtgacggctccaacatctacctgaagcacaaacctcgcgttatcctaaccaccatgggcgatgggcaccaacgaccattggaatgcagcgactgcaacggaatcgcctctaagcaaagactactcgcaccggtagctctagctgcagctccagacggaagtctctacgtaggtgacttcaactacattcgccggatcatgatcgacggaaccgtgaagactgtagtaaaactcaacgcaactcgagtttcctaccgctatcacatggcccttagccccctggacggttcattgtacatttccgatccggaatcgcaccagatcatcaaggtcaagaacaaggacgactcgcacgatcccgaacacaattgggaaccagtcgtcggaagcggcgaacggtgtctacctggtgacgaagcacactgcggcgatggtggtttagcacgcgatgccaaactagcctatcccaaaggcgtcgccatttcctcggataacgttctttactttgccgacggtaccaacattcgtatggtagatcgcgatggcgtcatcactaccttgatcggtaatcacatgcataagtcacactggaaaccggtcccatgtgagggtaccctgaagatcgaagaaatgcaccttcgctggcccacagaactgactatcaacccactagatgacacacttcacatcatcgatgatcacatgatccttcgcatgacaccggacggacgcgtacgagtaatcgctggtcgtccactacactgtgcttcagcatcaccaaccacattcgattcagacctcgcagcgcacgctacgctcgtaatgccccaaagcatcgcttttgctccatccggtgatctctacgtggcggaaagcgactcccagagaataaaccgcatccgagtgattggaaccgatggtaaagtagcttcatacgccggagccgaatccaagtgcaactgcctggaacgtggatgcgactgctacgaagccgatcactacctagctatcagtgccaaattcaacacgatctcagccatcactgtaacaccggacggtcacgtccacatcgccgatcaagccaactaccgcatccgctccgtcatctcaagtcttccggaagccggtacttccaaggagtacgaaatctacgctccaaacgctcaagaaatttatgtattcaatcggtttggtcaacacattgccaccaagaacatcatgaccggggaaacgacctacagtttcttgtacaacgtcaacacatcaaatggaaaactcagcactgtaaccgacgcagccggcaacaaggtattcctcctacgagactacaccgcgcaagttaattccattgagaacaccaagggccaaaagtgtcgcctacgtatgacccgtatgaaaatgctgcatgaactcaacactccggacaactacaacgtcacattcgactatcacggtccaaccggtctgctgaagaccaaactcgactccactggacgatcgtatgtgtacaactacgacgaattcggcagactgacctcggccgtcactcccaccggaaaagtcattgacttatcgtttgacttaagcgtcaagggagcaaccgtcaaggtcaccgagaactcgcaacgggaggtttctatgctcattcaaggttcatcggttgtgtcacgagtcggcgaagctgccacgaagactacagtaatggttgacggaggtaccaccagtgtggcaccttggggtaatacagtttccgtcgaatcggtaccctacattctactagcggaaatcgatcctctgttgggtgaaagctacccggtgccgtcgaagcagcgaactgaaatcaatggagatttgtccaaccgattcgagtggagatacttcattcgacacgttccggtccgaggaaagaacgcccgaacacttacccaggtcggcaggaaactacgtgtgaatggagagaacttattgacatttgaatacgagaaggacagttcgtcgatcaccgtctccgtggacgacaaaactgacctgttgaacgtaacgtacgacaagtcgtcgcgaccaattgcgtatcgcccacagtcgggtgagtacgccgacgtagatttggagtatgatcgcttcggacgattgatctcgtggaagtggggtaatcttaaggaagaatacactttcgatcgcgctggtagactgaatgaaatcaagtacggcgatgacagctcgattgtgtacgccttcaaggatatgttcagcagtctaccgttgaaggtaacaacgcctcgtagatcggactacctgctgcaatacgatgatgctggtgcgctgcagtcattgacaactcccagaggacacatccacgcgttctcacttcagacatcgctgggtttcttcaagtaccaatacttctcgccgatcaatcgtcatccatttgaaattctgtacaatgacgatggacagatcttggctaaaattcatccgcatcagtctggaaaggtggcgttcgtgtacgacagcgctggacggttggagaccattttggctggattgtcttcgacgcagtacatctaccaagagagcacgagtttggtgaagatggttgaagttcttgagccaggattcgaactgagaagagagttcaaatatcacgccggtgtaatgaaagacgaaaagctgaagttcggttcaaagagtgctttggcatcggcacatttcaagtatcagtatgacggtaatgcccggatgagcggaatcgagatggatatcgatggcaaggatttaccgatattgcggttcaagtacggccagagtcttggaacactggatgcgataagtgatttacggataacaaggaatgcatttaatagaaccgtagttcaggatacctccaagcagtttttcacgatcacagattttgatgaacatggaagagtgaagagtgttctgatcaatatcaagtcgttcgatgtttatcgtctggaattggactacgaccttaggaataggatcaaaacgcataaggtaatggtaggtcgagtgacctcgctggacaaagtgaactacaatgccgatggacatgtgagtgaagtggttggaacaaacagctggaagtatctgtacgatgagaatggtaacataatcggcattttggagcatggtgataagacaaacttgggttatgacactggtgatcgtgtggtacaggttggagatgtggagttcaacagctacgatgcccgcggttatgttgtcaggcgtggagagcaaaagtatcggtataacaacagaggccagctgattcatgctttggagcgcgatcgcttccaaacctggtacttctacgacgatatgggtcgattggtggccagtcacgatgaaaagggaaatgtaacgcagtacttctacgctaatatcaacgcacctgagctgattacacacatccactatccgaaggtgtcgagaacgttccgtttcttgtacgacgatcgtgacatgttggtggctgtggaaacgggcgaacagcgatactacgtagcaaccgatcaaaacggatctccgatcgcgttcttcgatgtgaacggaaatatcgtgaaggagattcgacgaactcctttcggaaaggtcgttaaggattccaacccggacttcttcataccaatcgatttccacggaggactattggatccgaatactcgactggtatacctggagaagcgattatatgacacagcggttgggcagtggatgactccttcatgggaacaactggctacggagatgcgtctgccgacggatgtctttatttatcgattccacaataacgatccaatcaatcgcaaagaaccaatgaactacatgaacgatttgaagtcttggttgaagctgttcggatacgacgtgaccaagatgcaaggatccaagtacaccaaggatatgatctacagaccgaaggccatgatcaaatcgccgcaacttgcacccgactttggcgtaatgtccggactacaatgcatcgttgagaaggtcgatgaaaagttctcggactttggatttgtaccgaaaccattgctcaagatggaactgaagacaagcaatttgctaccccgagttgcctaccgacgtggagtcttcggcgaaggtgtgctgatctctcgtattgatggacgagcattggttagcgtagtcgacggatcgaacagtgttgttcaggatgtcgtatcgtcggtgttcaacagttcatatttcttggatctacactttagcattcacgatcaggacgtgttctacttcgtgaaagacaatattatgaaactccgagatgacactgaggagctgcgaaggttaggtggaatgttcaacatttcgactcatgagatcaacgatcatgcgggaacgaacggtaaagaactccggttgcatggaccagacgcggtcgtgatcatcaagtatggtgtcgatcccgaacaagagaggcatcgaattctgaagcatgcccacaaacgagcagtggaaagggcttgggaactggagaagcagctggtggctgcgggcttccaaggacgcggtgactggacggaggaggagaaagaagaactgatatcgcacggtgatgtcgatggatgggtcggtgtcgacattcatagcatacacaaatatcctcagctggcggatgatccaggcaatgtagccttccagcgagattcaaagcgaaaacgacggaagagtgggggatcgcacaaaacgctgacgctaaggcagcacaggcacgaaacctcgtga

SEQ ID NO: 680 - DNA, 5245 bp, Aedes aegypti
tcaaacaaacgccatgcaaataacataaatgaacaaggtaatatctgtgaacgagtgcctaatatgaaacgtttcgaaaacatgtgaatataattcgttgaacatgtacccatgttcgataacggagttgttttagtgattgctatgaaaataatatcaaaacatgtttcttaaataattcctagatctcatgatttcatttttgattcatggaaacccgaagtcactgttcaatgtcaacaaatttagccaatctgctgatttgccgttcttctaacatatatcactaaggggttctttgcatttgtgcattgtcgaaaatttacgattcccgcaatcctttcaagagctagaggaaaatagtcattttccgctccaagcgcaatgcactgatgcaccctcgaccatttgccacagtacggagggaaaaagggattcaattccaactgtttttgcaatgtatcaatgtcacctgttcacctgccgtcgacaacgtatttcatccctgtcgacgacatgcttggcatctaataccttcgctctcggtcatcgttctaatctcccgtgttaaagccctaaccgtgtagtgtgtaagacaacgtccgcgaaccgggaaatgccattgccaacgaagtgttaaattgttttaattgttgtttacaaacagtgtccgccaccagcaccggtccaaatccaaacgacaatcgctttggttgtttcgtcgcagaccgacaatcccagaaaattaatgtagcgacaggaaatcatgcggttttggctgccagattggtcgtcctgtctgcaatactcccctttcggtcgacagagaaactagttaatgggttaggcagccacatgaacaaccgtttaaagaaggggaacactccttaactgttttatccaaaagtagccaattgaataattagacaaaaacaatagctaagacaaaaaatcactaaaacttttttttttttttttgaaaaactgtagataatcaatataaatcaaaaatacgctcaaaaataaaaaaaaatcaatgaaaaatagaaactaagcacttaaaaattctaaaaacgtcaatggaaaaataaaaatgagaactaagaagcaaaaactagccaaaaaatcaaaattattttccagttttagaattcaagttctattattgatttttctttgtttttactctttagaattttgaatagctaattcatacttcatctattacttgtttcgaattatttggttggctgtttttggataaactagtgattgttatccttttcctagggcatgatattatttttccctatgggttatggtcaagtgtggacctagagcgcaatcaacgcatcatgctatcgacagaagcacctcgcacgtgtaggcgtataaagtgcacatccttaatgcgtgtacaaccgtattgacagtgtggaatatgtaggccatcgtatctgtcgggctagtgatacggcgtctctctatagagataactgccaggggaaggggttgtgacaccacaaaaaccgcacacacacacagacacacatcagtgtggctgcatttactgcctaataacttcgagcaagcatcagcagcatactcacctgttgcagtagagcatcagcgccatggattaccagtgtattgtgatctacaccatcgtcaggataacaccgtatcatccgtacaactcgctctcggagctggaagcagaccagcatggatgcgttgattggattaagttctacattaaaagagccgtcgcagcatacctccgggcgctgaacctgtccccgtacaatgcggtcgttcacggaaatttggcctgtgtctactacgagcagggcctcatcgatttggccatcgacacgtaccgccgggcgattgaactgcagccgaacttcccggacgcgtactgcaacctggcgaatgccctcaaggaaaagggccaggtccaggaggcggaagattgctacaataccgcgctgcgtctctgcccgaaccatgccgattcccttaacaatctggccaacatcaaacgcgaacagggctacatcgaagaagcgacccgactctatctgaaggcactggaagttttcccagaatttgctgccgcccattccaacctggcgtcggtgctgcaacagcagggcaaattgaatgaagccctcctgcactacaaggaagctatccgcattcagcctacgtttgccgatgcctattcaaatatgggaaacaccctgaaggagatgcaggacgtagctggagcgcttcaatgctacacccgagcgatccaaatcaatccggcctttgccgatgctcacagcaatctggccagcatccacaaggactccggaaacatcccggacgctatccagtcgtaccggacggccctgaagctgaaaccggacttcccagatgcatactgcaatttggcacactgcttgcagattgtttgcgactggaccgattacgaggcacgcatgaagaaactggttgcaatcgtagcggaccagctggaaaagaatcgactaccgtcagtgcatcctcaccactcgatgttgtacccactgtcgcacgatttccgcaaggctattgccgctcgccacgcaaacctatgcctggaaaagatccacattctgcacaagccaccgtacaaattctcccgggacatgagccagcgactgcgaatcggttacgttagcagtgatttcggaaaccaccccacttcccatctcatgcagtccatccccggtatgcatgatcggtcacgagtggaagttttctgctacgcactcagtcccgatgatggcaccacgttccgaagcaagatatcccgcgaagcggaacacttcattgagctgtcgcaaatcccatgcaacggcaaagcagcagatcggattcacgccgatggaatccacattttggtcaacatgaacggttacacaaaaggtgcccgcaacgaaatcttcgccctacgacctgcccccattcaggtaatgtggctggggtaccccggaacgagcggtgccagcttcatggactacatcatcaccgacactgtaacgtccccgatggaactggccgatcagtacagcgaaaaattagcctacatgccgcacacctacttcatcggtgaccaccggcaaatgttccctcatctgaaggaacgacttatcgtgagcggcaagcagcagaacaaccaactggtggacaacgtcgcagtcatcaatgcgactgatctgtcgccgctggtggaaaacaccgatgtgaaaacggtacgcgaagtgattctcgcacacaagcccgttgagattcagcacaaagtcgtagaacttccaaccacaaccccggtggaaacgatgatcgcctccggacagattcagacctccctcaacggagtggtggttcagaacggattggcaacaactcaaaccaacaacaaggcagcaaccggcgaggaagtcccccagaacatcgtcgtgaccactcggcagcagtatggcctaccggacgacgccgtcgtctactgcaacttcaaccaactgtacaaaatcgacccgcacacgttggcttcctgggtgaacatcctgaagcacgtgcccaactcggtgctgtggctgttgcgtttcccggcggtcggtgaaaccaacatccaggcagcagcccaacagctgggcctgtcgcccggtcggatcatcttctcgaacgttgccgccaaggaggaacacgtccgacgtgggcagctggccgatgtctgcctggatacgccgctgtgcaacgggcacaccacgtcgatggacgtcctgtggaccggtacgccggtggtgacgctccctgccgagaccctggcttcgagggtggccgcatcgcagctggcaacgctcggctgtccggagctgatcgcacgaagccgccaggagtaccaggacatcgccatcaagctcggtaccgacaaggagtacctgaaggcgatccgggccaaggtgtggctggcccgctgcgagagtcccctgttcgactgcaagcagtacgcccagggaatggaagcgctgttctacaagatgtgggaacggttcgcccgtggcgaaaagcccgaccatatatcggccaaagagggccccaagtaagttgaggggacgctacgaatagagctattttataggagggaaaaaaacgtatgcttttataggtccacttttaatgttcgcagtttttttcagttgaatgaaacttttattatggcagcgatggctgtaatatggaaacttgacacttgtatctagagaaagcttacaaccctatttaaatcgtagttaaatataaacttaaggaattgtataaagttctatattttgaaggtagcatacgtttgatacccagcccccatcttagctataattaattgaaacggtagaatgataatcgattttcttttagaactgatttacgccatcacgagaaatagaaaatatcctacattgaattgaacttacttacgataaaacttttcagtacaatccgctgaattattaggtaactaataagagggaaatttagagaatatatatcttttttagcaacgcgcaacgaggcgattgttcatgaagacaaaccaaataataaccaatatatcatgtaaatgcattgctcttggcagatatttaaaacgttgcaatgctttcgttccctgagctactaactgtagatagcgccccatgctcagccacacagtaaatttcgcatttcttgtgcgtttcgtttcaaaagcgcatctagcaagagaagacagctgcagtacaagcatgaaaaaaaaaatacttaccccaagtcagcacagagagatagtttgagtcattagcatatcttgcaatttgatcaacctacaaaagtgcttattttgtggagtgattagtttattctccacaccaacctaaagtgttgcgagtcgatttgtgtgattgacacaaacttaaccgctacccaactaatgtgtgattgatgatgatgaagatgataatgatcgacgatgagtgaaatatgaatatgtctaacagtgtgtacccccgcaatgcgttggtgtgacactaatggcggcaaatactttgtaaatagattcgtttcccctaccctgaccctatctcagaagcgtttgaacatgccgcaaaaagcaaataacaattattttctgtgtagaaatgtaagtgatagtaaggaaataaattcatgttacttgatg

SEQ ID NO: 681 - DNA, 807 bp, Aedes aegypti
atgagaatagaagttaattcggctgcggattttctgatgaatttgctgcgagtaaaaaaagcaaatcagctatccgagagccagctacagcatttcaagggttcgttagagcagattttgacgcgtcatttcgcacgccattggtatcctgatgttcctaccaagggttccggtttccgctgtctacggatcaacggcaaaatggatccgattatcgagaaggctggtaacgctgcgggtttaaactcggtcgcacttcgaaagatgctacctctagagctaacaatctggatcgatccggatgaggtgtcgtaccgaattggcgagaacggtaccatctgtgtgctgtacgatcaacagctaagccgtgccagtccctcgtcggatcttgattcgacgggtagcagtagctgtgatgaattcattatggaacgagtcggccgactggatctgtcgacgtcgtcagatagtggtactagtgttatggtagattttatggatgccaatccatcgaattcgcttgtaacgcagagcaagcacaacaagtacaacaacaatcatcatcataataatcatcattacgtgaagcgtcataacaacagcgtcagctcgtcatccagtggacaaactagtccaccgcttagtccaccatacaacggctacaacaatagcaacaactttaacaacaacagatatcaacataataaccaacacaacaatttctactcgccatccgttcatcagcagcaaccatacttcccctgggacaaccagttcgttaacaacaaagttcgtacgcagtgttaa

SEQ ID NO: 682 - DNA, 4131 bp, Aedes aegypti
gccctttcattacagtttcagtgaacgaagtttaccattatggctacgtcgtcaggcaaaaaagggaagaagacttccaagaagaacaagctctcgctcggagagttcctcaccgatggtaacgcggcggcggtatcgcaggtgcaggtcgccgttccggtcaagttcagcaactgggccgacgagtgcgacgaggacgaggacgaccgtccggtccgcacccagctgattgctctgccaacagctccgcgggccacccgcctgctgaacgatgacaccgttccgcacaatccgcccttccaggcgtacatctccaatctgccgtacgatctgaccgacaacgatgtgtacgacttcttcgacggaatggagatcgcctcgttgcgtcttccgacgcgtgacgatggcgaacccggacgcctccgaggatacggatacgtcgagtttgtcaagcgccaggatctgattgatgcgctgtccatcactgaaccgatcatccacggtcgccgtattcgcattgatctgtccagcgaaagcgatcgcggaaggcagcagcgtaaccgcggctacgataactatggcggcgattcagatcgtcccatgggtaactggcgtgacggacctcgtgcgaatgctgatcgtgaccaaggtcagagaagaccctaccagaacaactacaaccgcgatcgtggagatcgcgaagatcgagaacgctaccctgcagacagtggcgccggcggaaactggcgccttggagatcgtccacagccaactccacagtcgccaccttccagccgaagaggctacgatcgtggagatcgcggtgatcgtggcttccggcgaggtggagacctttccggagatcgtggcggtcggagagatgccgaaccaccgatggagagaccgaaacttgtcctgcagccccgcacattgccacttccggagaggcccaagccagaaccggagccggaagagagagattccagccgggatcgtaagtacgactccgaggcttccgagaacaaagaaaacgaagagcagaaagacacccgccctaaacctaccccagtgcccgcggccaacattttcggagccgccaaaccagtggacactgcagcccggctgaaggaaatcgaggagcgaatgcaggagaaggcacgactggagaaagaggagcgtgctcgcaagaaggctgctgctgccgccgaagccgcggccgtggctggatcctcggccgacgaagacggcaaggagaaatccgatcccagtaaagacgaatccgccgaagaacattccgaggaacagcagcacccggagccgaaaaaaccggtggaaccggtcaactggcgggtgcgatccgatgacaacagagacagcgaacggcgccggcagtcaccccagcggaggtacagcccttcgcgcaactacaccaaacgatccgatgattactcagacaatcgggacaaccgggaccggggtatgaaccgggacaatcgcaacatgagagacaacagacgagattacaatcgaccaggcgatcgggatcgcgatcgcggctaccggggagaccgtgaccgggacatgacccgcggaggaggcggccgtgacatgcgtgacgatcgcgacaaccgtgaccggcgggacaacgtgcgacagtacgatcagccgcgcgatcgggaccaggtaccgatcgaggagcgtatgccaaaattccaggaatcgtctggacccaacctatcaatgaagaacacgttcgacggattgtcggcggatgaagtcgacgattagagcagttccaatctcaaatctagcaaaacaaaggaagcagacgagaagagcccttgagcccttgagggtagggggcgtaggttcacaaacatataaaagcaggaggagatcaactaactagtagtattctaatacaagaaacaagggcacctgtggtggggacaggaggagaaaccattttggattggaaccaatattctttgattcacagcggacacagaaaggaggacaggaggacaaggtactagagaagcgattaatataataatatcaaacagagagcacagcataaaaaaccgatagcgacggagcgtgagacgcatacacacatacaggcacacacatacacactcagagactagaacgaaccaccagtcggtcgatcggtcgctgactagaagggataggttacaaatagcgcttagagtgctagtgcatagattaagacaatgctgccgctggcaaggagctgacggggcgatggaaatgcagctctttccgtggctcgatgtgcggacttggggaagcgaagcattttcatcgcccggtcactttcagcagccaatcgtgcgtgtgcgaatgaacaaaggaggagaatgggaaccggggtagtagatcaaagtttgtaaaatattctattcactgtgtgtaatttatgtgtatgtgtacccaatggacccggcttcgaggtgttttaccgggaagttgcatgagatatgatgcgaagatgtatgtgtgaagtatgtgatgagcatgatgatgatgtgtgtgaatgcataccataaagatacttttgttttaaggaaattaagcagtcggaacacgttggatttccatttggtagaacagcaaatcgaaatcgtactcgacggtgatgatcccgagagaaagacagtcgaagatagcattcgcattttttgataagacaattttacaatcacaatctcacacattacacacattgattattgcagcagcagcatggtaattgaatactcgttcactatcgaagtatgattaatatatatgtatgtaaatcatgaataagagtaccctcatggaagtggcagtgtctgccttccctggtgggagttctgattccaatgtacaatgatctgaagcgacaatttagcaggaataagatctttttttctgtactcgtcgattttagacgtatgaagtctttagaaaagatctccagaaaacttgatctaactctttattcgagcttagtaaatcagttctgaatgtttaaacttgtggtggatccagtcaatttgtttgcttcgcggatgatatagacactgtaagccaaacatttgaaaagatggcagacctgtacacttgtacgttttatctttcgatcttttcattaattcattcgtctaaaatcaacgagcagacatcattcgtctaaaatcaacgagaacagagaaaaaagtttttgccttgccaaattgtcaattcggaccactgtgcaatgatcctctccaaaccttcgacttatcttttggaatataattttgttcgttggtttccttcgtcgtcgttgtcgtcgtcggtgtgtgcgtctcatcggtgtaaaagttagaatacgatgcgtgtgaccattaattcttagagaaaagagagtgtgttgccgaagaaatgattccaaaatgtgctgatagaatgtttaatttgttctggcaatgatttccccctgttcgtttcctccattttgttttttttacatatataaataggaatgtataacatttacaaatttctgttttattctatttaacctctgcgaaataaaaaaagctgctgcgaccccacaactattgcggggaggaaatcgcttaattgttatataacaatattcgctgaatttaggacgcgctatcgattaatatggttaggtagccgaaatctcagcaaaatattgtctaccttctttttgcgtatgatatacttacagacttacacagacaacacacacatacatacaaaccatatgaactggcaatgtttctttatattaaacagaagaaagctcgtgctcatagataatcaagaatgaagatataaacaaatagttaatttaattgtttaataaatgcatgggaactgtcaacaacaaaaaagtctaggaaagattgccacctttttgtcgcaaattagttatctattgaaactgattttttctgtatttttttgtcgggaggcgtatgatggaattatttagagttctactactattaattacccgtacccatatataggctaccatatacgggaagctaggaaaaaaccaacttgaaaaaaggcaatttcagaatacagcatatacatctaagg

SEQ ID NO: 683 - DNA, 4367 bp, Aedes aegypti
gggaagaaaaagaagaagaagctcgtcaagctgatttctctgtggttgctgtgttcgtgaagaaaaaataagttttgacaaaaaaggttcgacggaaaagagtaaaagagaaaattattttatagctgatgatttcaaaattgttactcgtgataagggaggaaaagtggaatgaaacgcaattgaattgcgcgattgaaaaagcaaaagtctacgaaaaaatggtgtaataggagagagtgaaaataaattgcgccaccgcctttttccgtaccgagaggaaggctattactttcggaaggtccatcatctgcagctgtccctttttgtaaagggttactgtgatactgtaacagtttgacgagctgatcctcctgggtggatttttgcaatcgtagcaggcatttacagcgccattaaaataggtgctgctgctgttggtgaacgcccataaaatcggatttctacgataacatgtcattgcgtcgtgacggcctttcgggcattcggtttagtgtatctagttatagataagaagattgcacaaagaggaaggaagtgcactattatttgcaaatcttgagcgaaaatctcagttcgtgaccaataattgatgtagtaagatattcaacacggggcctacttggtggtaaaagtgtataagttggttgccatagtgttgccgcttcgaatgtctgtcagtgtgttcgtggcctgctattaatatttgaaaaatagtcctcgagtagcgagaagtaaaaaaaaacaaaatcccagtttactaggattatacgacaactgccgctgctcaccatataaaaaatgaccgacaaaattaccaaattcgaaaggatggcgatgacgaagccggtgccgatgaaactatttgccgcatgggaggtggatcgtacgccatccaattgcattccaagattatgctccctgacaataacccgtctgtcgttgctcaccccactgccgcccgatctcacatctctgtcgctagcagtcaaaatgcagagttctaagcgtacgcttcgttcacacgagattccagtaccccaatcgttgagcaccggctatggcagtaccatcagtagcggaaatatgagtagtagtgcgccaggtgttgttggtcaaggaggtcagctcaattcacctcccttattggaaacagaacttgatctccatttcagtctacaatatcctcactttatcaaacgggatggcaatagactgttgattttgctacagcgacgaaagaagtataaaactcgtactatattgggttacaaaacactagctgaaggtgtgattcgcatggatgcagttttacagaaatctatggatatgacggtagaactcaacgggtctgggaaagcaggtcgtcaggggcttacgatagccactctacgtgccacacaggtctcttccattccagtggatcaagacaataaaaacaacaacagtctattagttacggatcgcgtcaatgagtattctgatgaggatgaagagcaggaatttagttcaggagacgataatgacgacggtttatccggatatgcagcgaaaaggaattatgctggaaagcgagatccatacaagaaatttgatcgtggtgacaacgatggcgacggagatgatgggaatttgctaccttcaaatcaagtggatagtgatagcgattttgaaaatttaggaaaagaaaaaggatctcgtgctaaaatgagtcggcaacgaaattttaaacaacgcatcatatcattattaaagcggttcaaagttcctgacgaactggaaggggatgtaccggaacgtgggcaatctttgcggggcaaacgagatttagacgcattgttccaagaattagaatccttatcttgtggagaaggtgatgattccggccaggacatggatagtgtatcaattggatcaacgccgaaaccatcattgagaccatttttcgaaaatccgaagccagcactacaacatcaacaatccgctgttcaactaagtacgctacagaaaagtaccagagattttatgcctgaaaagaaaaccattttagagaagcgtgactcactcgtcgaaaagaaaagcaatgcagtaataattgccaataatcttaataacagtatgaacaacaatatcagtaataacaaccatactagcaattacagtaacagtctaagtaacagccaagaccgttccggtgactggaaaaatgatagttccggcaatgagggtggtgctgggaatacggatcctgaagcattatcatcggatccccagaatactggcagtccaccaaaagaaaaagaacaagcggttgtggaaaagaaaaatcgcctatttcgtaccagtagtagcactcccaatagtgccaaaaagcaaaagcaatcccttagcttttcatccggcgatcaacctaaaacatcccttgagacttgtctttcgccaacaaatgtagagcctcgtaaatcacttctggaacaactgtcgcgcatattcaccactgaagaatcccagctaccggatgtagttacaattattggcccaccagaagccagcagtagttccactcttacacctcggctagtgtcactcatatcatcaacttttcggccaacattttcccccaacaacacagctgaagtgaaagcaatcacacaagcactcatgaacaaaatccaaaaatactgtaactcaacggccaagccgccgacgactgtaaaagttttgttggttggtggagattggctacagggggccgtgttacgccattatgttgagcttctcggaattcgtccacctgattgggtgaaccatatcagattctacattgttccaattggttcctgtggagtggcgcggtatctaagcttgattgattcgagctactcaagcatgtttggaactgagaactggcaacaaatctgtgatcgggctgctaacctcgaaagcgcacaaaccaaaattgaatcagcggaaatcatcagccgaatacaacgctatctgcattcttctgggccttgcactcaagttcctattgcggaagcaatggttaactatcgggatgaagattcttgccagatttttgtcccattcataagtgatgtcagaatagggtgtctagaaggaccgcagctttcgttagatttggaagaaaccatgacacaaagttcgcagcaaagctcggatagaattttatcaagttcgccaccacaaagtggaagagcgtcaccccctgctccaataacaccagctcccataatgcaacatcaatcgaacagtagcggaagtccccaggaatcagtagaactacaggtggattattggccgttggctcgacccattttagacgcaaaagaaaaatcccagagtaagggtcaagatcagtcaggcaaaaacagtattaaaagcaccttcagacatttgcaggtttggagactgccacttgcaccaaataatggcgaatacactaacggtttaactttaagttatgccactaaggagaagaaacagaagagcgttatgcggcttggcaagaagaaggaaaaagatcgcgacgctgaaaaagagcagtgtgtagaaggtgttgctaggctgatttgttccccgaaacaatcccatccagttcctttacgagtttatatcgacggtaccgagtggacgggggtgaaattctttcaactgtcatcccagtggcaaacacatatcaaaaattttccaatcgctttagttggagcaccactggctccggctgagatgctaacctagtcagtttcttcatccactgcattgggggctgttgttaggtccggcatgatgacgcagaaatccgccatcgtgttaggtcttccaccagcgccgcagcagggattgtcatcatcgtccaacattatcgcatcgcaatcttctactgctggtaagtcagataaaaatcgctgctcctctactacgtttgccatcacaggggcttctattattagtaataacgttagttctactaaaggtagcgtaagtggtagcaaaaatactatcactcctcgggcctcacttagcagttcatctcgaattctgagaccccgcagctgggctgctgctagtcgatccaactgcgactgaatagaacaacattaataaatacatgttttgtgtataacgctacactaccttgtaaggctgtttaatagaaaaatgttggaagtcaattttaaacggctacgctcaaaactatgcgattactttagaaacaggcgtccatctagcgggtaatgttatatacttgtgttatgtctgcaaacttgtttaagagacagtgtatctatttttgttaaaaaatgtaattgttggaaaatgat

SEQ ID NO: 684 - DNA, 2655 bp, Aedes aegypti
atggccggcaatggcgatacatcctggtgcttttcacagataaagggtgccctcgacgacgatgtcaccgacgcggacatcatctcgtgtgtggagttcaaccacgatggcgagctgctggccaccggcgacaaaggcggccgagttgttatattccagagagatcctgcctcgaaatcttcgaacccgcggcgcggcgaatacaacgtctattccaccttccagtcacacgagcccgagttcgactacctaaaatcactagaaatagaggaaaaaatcaacaagatccggtggctgaagcgcaagaaccagtcgcacttcctcctgtcgaccaacgacaagacgataaaactctggaaggtctcggaacgggacaaacgggtcgagggctacaacacgcgggaggacaatggcagcatacgtgatccgtcgtcgatcagcgcgctgcgggtgccatcgatcaagccgatggatctgatggtggaggcgtcgccccgtcggatcttcgccaacgctcacacctaccacatcaactcgatatcggtcaactcggaccaggagacgtacctgtcggcggacgacctgcggctcaacctgtggcacctggagattaccgaccagagcttcaacatcgtcgacatcaagccggccaacatggaggaactgacggaggtcatcacggcggccgagttccatccgaccgagtgcaacgtgttcgtgtactcgagcagtaagggtacaattaggttatgtgatatgcgctcgtccgcgctctgcgaccggcacgcaaaactgttcgaggaaccggaggacgtggacatcaccaacaagagctttttccgcgagattatcagctcgatcagcgacgtgaagctgagcaacaccggccggtacatgatttcccgagattatctgagtattaaggtgtgggatctgcacatggagacgaagccaatcgagacgtatccggtgcatgaatacctccgcacgaagctgtgctcactgtacgagaacgactgcatcttcgacaagttcgagtgctgctggaacggcaacgacagttcgatcatgaccggcagctataacaacttcttccgcgtgttcgaccgcaacagcaagaaggacgtcacgctggaggcgtcccgggacatcatcaagccgaagacggtgctcaagccgcgcaaggtctgtaccggtggcaagcggaaaaaggacgaaatcagcgtcgactgtttggactttaacaagaagatcctgcacaccgcttggcacccgctcgagaacatcatcgccgtcgccgctaccaataatctatttatatttcaggataagttttagctaatagtaagcgtagtagtaataatcaattataaatgtgtaggctgaaacagaaagaaacaaacaaggtgaaacagattaacagacattggtgagcaaaacaaaacgcggtgatcgagcgatagattgagtgtcgtcgtcgtaagggtatgctgaaaggccgaaagtggataagcgaaaacacactcagaaaaatgaaagatgagaaaacgagtgcggcagtaaaacaaacaaaatcgcagcagcagcgcatataaatcgtgtatggatgcttgaatggatggagacgatcagaaaagtgtatgttcgcgcgggagggatgtgcatggaaacgtgtatgtaaggtagttataaaaatgtttaaaaaacagaacaatatgagatagtaacaaagcagtcccttacaccgccaccgccgcagcaacaccagccgaaactgattacgattattgtcaatattaattgatagagtttagacttaactttgaatcatctttatcatcataatcatcatcatcaacgatacactcaatagagcgagataacaagaaaagcatccgcaacaaacacacacagctgacgaaggctccagagccgtgcactagaatattgcaaaaaattgccatcactccccctaatcaaaagcagcatcattcatcgtcagttttgttttatttttaacgttcagtagtccttatcggtggacattagaagacgactatgtgcgcgcgcgcgttgtaatcaaaaaacgaaaacggcaaatcaagaaaccccacacaacatataggtacagttaaacttacaaacaaacttaagccccgcgatggccagaaagccatcgttacttgttgcattctttataattatgaacatatagaatattgattgattgaaagtattttgctttaaatggccggagcgtcttcacacacactcctcagccgacggatccactcaaaacagaaacacaaactcttaagaacataaatttcgtttttaaattttattttttaaacataaaatggaagttccattagccagcaagcaaacaaaaaaaaaactacaaccaagtaaagcaagaacaacaactattgtacggaatgatgcgtgtaggtggaacagacaaaacattcggaaataagaaacggcatctggtttggattgattgatgtgagtgaaaacgagagaatgcaagcggcgaagcaagtttgagggaataatttagaggaaaaggggctaaacatgggagggatatgaagcgcttttctcgtcgtcgtcgtcatcatcatccgaccgaacgcttttgttggaacagat

SEQ ID NO: 685 - DNA, 6942 bp, Aedes aegypti
ccctgatagtcatttgttttgaaaaaacgttcgggaactatttggtcactattttctcaaatataatcactaaaattcacttctcgctaccagccctgctcagacaaaaaccgctcttcgccaaatcaatttctttcccttcttcatactacacctaacaagtccaccacacccaaccgcacagatcataatcactattatcaatttaaccgcgcaacttcgttttcgctttcctgagtggcacacttttcgagttttatcatctccgcacatatgattggtgccatgccagagtgaacgcttcttccaaccaacttcagttagaggggcgccacaacagaggcaaggcgccgccggcatcgggtttcactccgaagaaggatcccgttggaactgttagaccggaagccggaacccacatgcatactctcttggcacgatacggcacgcgcgcgttgctgaatgtctattgtgtcttccagaagaagaagaagtgtgatataggggaagggagtgtaagggttcaagcatccgtaactacacttaagcagaagaagaggagtgcagatcataatcccggtgtgttcaacctgacgtagaaacggttccgacagggccagacagctgatagacagtctcacccctatggtctgttcatcatccaagacataggccgcttaagttttggcgattgggtacaaagagtgaagaggacgaagcacaaacggcaagaagacaagtgcaacgggctaataaataagtgtaatcaagtgaattaatcaagcgtgttgccgggttttgctcgaccgattcgaagacggcgcggcacgcagcagggcacgcgtgaaggtggccaagtggaaaacgtgatccggtcggagaacatactcagtaatagccccacgtacattggtctcctaactcgatcgtcagaatccgcgacaatcccgcagtcaaagccgacaagcgcccgcaaacccacgaagcatggcatggcgatttaaggcctcgaaatacaaaaacgcagccccgatcgttcccaaaccggaggtatgcatccgggacatttgcgtaggatcctaccagacctatggtaacaacattgcagcctcggcggcgttcatcgccttcaactgggaacatgtgggctccagtgtggccgtgctgcccatcgacgactgtggccgaaagagcaaaaccatgcctctgttgcatgcacacaccgatacggtaacgtatctggacttttctccatttcacgatggcctactggcaaccggctcgcaggactgtctggtgaaggtgtggcacatcccggagaagggcctcgagaactcaatctccaatccggagtgttcgttttcgaccaaacagcggagagtggagacggtcgggttccatcctacggccgattgccttctgtactcgacagccgtgggatgcgtcagtctgtgggatttaacatgccagcaggagtcattctcgaacaatcaacatccggaggtgattcagtctctcagttggaaacaggacggcaaggtctgtgcgactagctgtaaagacaaaatggtacgaatcctggatccccgggcggagacgccaatatctatgatagccgagagtcaccaaagcatcaaggactcccgagtggtatggctgggtgatcaaaaccgaattctgactactgggttcgatgccgctcggttgcggcaggtcatcatcagggacttgaggaacttctcagtaccggagaagacgctggagttggactgctctacgggtatcctgatgccgctgttcgatccggatacgaacatgctgttcttggcgggcaagggcgatactacgatagcctacctggaggtgacggacaaggatccgtatctgatagagggcatacgacactcgggagagcagaccaagggtgcctgtttggtgccgaagagggcactgcgggtgatggagggcgaagtgaaccgaattatgcagttgacgtcgaattcagtgattccgatcatgtaccaagtgccgagaaagacttatcgagacttccacagtgatctgtatccagacacaaacgggttcaaaacagagctaacgggtacgcaatggctcaacggagtgaacatggccgttcaaaagatcagtctggatccagcgaagcgagaactcggcgaacagcctattatcgttctgagaggtaacctgaatgaagtagtcaagaacatcgcgaacaaatcgaaaaatgcatgcaccacgcccatcagtacggcggctaagatcgacaaggaagccacgatcgtgaagcccacttttgtcccaatcaaggacaagatcaaacagatggaacagcagtcacacagtgagaaaagcgagttcgaacagaagttcaaggaggtgacctcgctcaagcataccgagaatgccaacattgttatcgaaccgaagccttgttacaacgagaacgaaagtaacggcaaccatccggaacagctcggcagcttggacgaccaagatggcagcatggatgatccgattcagactggagaggtgacacctccgaagccactgccgaggacatcccgcaacaactcagtcaccgatccaccggtgggatccggtgaagaagttcccgtcgttccggcacctcgtccggtggccagaccaagaatgtccaccacaggatacaagccccgcctaggcccaaagccgttcagcagtacgggatcttcgggagagttctccttcgacaaggtgttcaacgtcccgcaggcccccggttccgaaaacggagattcgcagagggactcaaatgacaacactcaggaaaacagtctggtgtctaacggaagcgtggaggaaactcacgaaaatggtaactgcaaggaaccggaagcattcgcggagatgactacggaagaggtcgtcatgcgaccgaaggttacggaggaagacgacaaaccccggatcatctctaccgcggaacgaagaaagtctggagatcgagaaaagatttttgaatccaaggtctccacggaatcggaggaccagtttgacgccgccatggaggacaagccgagtcagttcgaacgattgagtggccaacgaacaagcatcgccgagcgaaggcgaatgtacgagaaccgatcgcagagcgtccaagaagaaaagccagcatcaccggttcctctcagacgccgagaatccctcaaagtccgcggcgaacaatctaagaccgacgaagaggtcatgcctccgccatccagcgtagagttcacgaggaatcgtagcgatctgtgcaaggaaaatcttcccgcggacatcaacaaacgcaacaacgccaactccgccaacaccacatccaagcgaacctcgacagttttcggaagagtgtctaagttccggcacctgaagggaacacccggtcacaagtccacacacattgagaacatccgtaacctcagccggcagatcccgggcgagtgtgacggcttccaggcgaactcggagcgagttgccgtaccgatttccggggccggaggcaagattgcaatatttgaactcagcaaacctggtcgcctgccggacggagtgattccatcgctggtcaacggaaacaacatcatggacttccaatgggatccgttcgataaccagagattggcggtggcgtgcgatgacggcagcgtgaaaatctgggctatcccggaaggaggcctcacggagccgaccaacgaaccggagaaagagttggttgcccattcggataagatctacatcgttaagtaccacccgctggccaaaaacgtgttcctcactgctagttatgacatgacgctgaagatctgggacttggatacactgaccgagaagtactgcctgaagggacacacggatcaaatcttcagcgcagcttggagtccttgcgggatgtacgtggctacggtgtccaaggacggtaaactgagagtgtacaacccgaggaaatcggaaactcctattcgagagggaaccggaccggtgggaactcgcggggcgcgcttggtgtgggccatcgagggagagtacattgtcgtaactggattcgataaagtttccgaacgacaaatctacgtctataaagcgacggacctgggtgcccctctcggaatggtgggcttggacgtgtcgccggccattctgataccgttctacgacgaggacagttcgacaatctttgccaccggcaaaggcgattccacgatctactgtttcgagattaccgaagagtctccgttcatctgtcccctatcgcaccatcgatgttcatcgttaacgcagggcttgagtttcctgccgaagaaccaatgcgacgtcgcatcggttgaatttgccaaagcacaaagacttaccaacggaacggtcgaaccgttgagcttcaccgtgccacgtatcaagagtgagctgttccaggatgacctgttccctccgaccaaggtcctgtgggaatcaacgctgtcggcggccgagtggttcaccggtcgtgacaaacccgcccagcggatcagtctacagcccgagggaatggattcattgtcttccattcaaccgacggtaacgacaccgacgccggcaaagaaaagtgataacatcaaccaaatcattgggcagcagacgcagttcaacaaggcctggagtgcggacctggtgcgatcgaaacaagatgagatcaaaaactcggtcagcgcccggatgcccatcaatcgcaagctcgaacaggatgacatggagggcgtcgatgagaaggagtgggaagagtaaaccgcaaaccataataacctatagtaacagctactgcaatgtaacataagtgcatgagtaacacgtttataccgatcaatagtttagcaaacccgcatcgtaccctttctaacgcattttataaaccttcttatacgaaaccagatagaccgcagttgtctctttaatttgtctagtactaaatagagaaaaaaaaactaggacaaagtagttgtgtatcttggaagtgcggaaacaacagagactgcaatatgtgacaaatccaacaaccaactgccaatctccttgaccaacatttgagcaaaatccattacgaacagcagaacactcccagtcacaaaaaaaaaacacgaaacacatctttaaccttaaacttcccttttgtcttcgattttgtgggcaacaattttagccacatctgggcgcagcatatctagcatatctggtgcaacaagccaagccagcagttactaaaatgatttgcatacgtattgatcaaactctactctatactttaggaaaaataaataaggataatcacgatatcgctttggtgaagctttgagattttgtgcatgttggcgcccaaccgcgcgagggcgccactataattggaagctagtcaagtgaacaatgctcaaaaccaatcttagtaggtgtagtaacgcgtatggatctgcttcagaaggaagccgaaagcttagagaatggtaagaaaatcgcaaagtccggtggtgcaaacgaattcggtgcacacaatcttcttattcgataggcgtgtagagggaacctatgtaaattataatcgtatcgtttgttttaaaatcgtgctacgtatttattactccgacaattcactctgcgaaacaattgtgatgatttcatatttaggaagatacgcacacacacacataaactcttacgtgcgtcttaattgtttatataaactttctttttttttaacgattacgaatagatttttaggtgtgccattgtccctttttgttttgtgcttacaattatatcgttataagatttcaatgcttacagtttcagtatataactattcgtcaactggcgtaatgcgttttctactgcactttgtattacacagcattaaaggtacataagcgaaataattatttacaaaattcggagctagcatacgggcagaacgccgagtcacaaatagattcatgaaacgtgattcctttcatcagactgttccaatcagagccaatctcttttgtttcagtgttttctacgaaagacattgatttttgaccttgaaaaaatcaattctcatctttttcagtcgcttgaaagaattcattggcattatagcaaattcgatttatttttaaattcaacttatttcattctcttggaagacggaaagtatttctgacaacactggtaatgaacctatcaccgctgttgattcatttgtagtgttgccagaggcactttttaattcatcataggaggctgtagtgattaaattgtggtcaaaatttcagtatatgatacgagtaaatcagaatcgtgtttttcgaaggaaacttttgaagagtagttctgattatcaggaatggtctgctcaagcataactatatttataatattaattactgtacgactattggactattattgataggctattgaaattttctgcataaaacgcaaaaaagactagataatattcagtttcaagtttttctatccgtcttgataaacaattctcaatattacaatatacaaaagagtaaaaaacagtaataagttacatactaataacagattgaaattgattgttcccttataatgaatattgaaacaccgtcaaacaatacaacatttgaacactgatgctatttgatggaaatgactttcacataactaaacacattacaatacacaaaccgacaaccgaaactgatgatgaagaaagtaacaaccagggttaaatcagataaatgggagagaaggaagacgcccaatggaaaatctctagcatttttacaccgaacctggaatacaacattgaaacaataagtatatatacagtacagtatcttacatataacaaaatgtaatgaatgaagaaaagcaaaatatacaattagtaaaaaaaatatc

SEQ ID NO: 686 - DNA, 2630 bp, Aedes aegypti
atgaggctgtacatctgtggagttcccggtaccggaacatcgacaacggccggtggcggcggaggaggaggtggtggaggcaccacccgcggaggcggcaccagcatgtactccgcccggcattcggtcagttcgtcgtccaacgtcctcatggttggaccgaacttccgggtcggcaagaaaatcggctgtggcaactttggcgaactgaggctggggaagaacctctacaacaatgaacacgtagcaataaaaatggagccaatgaaatcaaaagcaccacaactgcacttagagtataggttttacaaattattaggatcacatgaaggtataccggaggtatactactttggtccctgtggcaaatacaatgcactagttatggaattactcggtccttcgctcgaagatctgttcgatctgtgcggccggcgattctcgctgaagacagtactcatgatagcaatacaattactccacaggatcgagtatgtgcatagccgtcatttaatttatagagatgtaaaaccagaaaattttctaatcggtagaagttcaaataaacgtgataaaattatacatataatagattttggtctcgccaaagagtatattgactcagatacgaataaacacataccatatcgagagcataagtcgctgacgggcacggcgcggtacatgtcgatcaacacccacatgggcaaggagcagtcccggcgcgacgacctggaggccctcggtcacatgtttatgtatttcttaagaggttcactgccatggcaaggtctgaaagccgacacactcaaagagcgataccaaaaaattggtgacacgaagcgggcgacaccgatcgatgtgctgtgcgagggacacccggaggaatttgcgaaatacctgcgctacgtgcggcggctagacttttttgaaacacctgattacgatcacttacggagattatttcaagatttattctattttaagggttatgtagacgacggcgaattcgattggaccggcaaaacgatgtccacaccagttggatcgttacaaactggccacgaagtagttgtatcaccaaacagagaaagacacacacctgtaaataagcagcagacgaattcaaaaggaggtgtcgccgcttggccggatgtgcccaaacagactggaaccctgggcaacctaacgccggccgaccgacatggctcggttcaggtcgtaagttcaaccaacggagaattgaatgccgatgacccaaccgccgggcattcgaacacgcccatcacgcagcagccggaagtggaactggtcgacgaaacaaaatgttgttgtttctttaaacgaaagaagaagaaatcgacccgccagaaatgactagaagcagtgcaatgtagtccggaacgtgaggctgtcaagctgctacgtgcaacgtcacactccaactcgcgcgacagcgtgctgaatccaagccaggattacatccaggcctcgtcgcagcatacgatcagatatccatccacctctgtactggcatcgacaccgaccgcccaaacgccgacacttccattgtaatttattgctaactattattatgctaatccagattattaattaattaattattaaattatttattataattttttccgcgcggtgttacgtcccaacatcaaacaaaaaactacacacaaatcgcaaaaaaatacaacaatggtaccaccaccatttccattcacgaatcatggtcgtaaatacgctattttgtcgcgtaacccccggttctgcccgaataacgaaaaaaatcgcacacacacttcaatcaaacgcgtcctccaaaatcggaacaacccgccgtggcccattttctgtgaacacgtcgcgcgcgtatgtgtgtgtgcgtgcgtatgtgtcccatacatgtgtcgaaaccgatcatcccaataatcatcccacaatccaaacgatcaccgatgagtagtgactttgatgatgacattgatttcgaccccgacgaccttacgatcctgttacactttttccgtaagctttgatatcgacttccgggtgtcccggaagggatcctgcagacgaccactgctaccgttaccacaatatcggccatacctgtgtgtgtgtatgtgttgtctatccgactctcagtagctctagtactacatcaccatctcagccaccaccaattcttcttcttccaccactgctacaacaaagtacaacacaacaaatcaaccgatcaccagcaacctttcctttgtaccacacaaaccttctattactactttctcctctagtactacgacacacggcaaaacgatgttctcttttctagaaaaaaaaacttatgtcagaaactatatcaatcccctcccagtattggcagcttctttcatctccctctatctattcgctatcgaatcacaaaaccagttagcaaacttccaaagctcagaagcaatagaatcaaaataataatctactactacaaaaaaaaaacattccgacttcccccgcctcacgcgttgcacaccactaagcaacaatcgcgatcccaccctgcagcgagtgcctcctaagcaactaaactaacgttaggtatagatagaatcatg

SEQ ID NO: 687 - DNA, 3541 bp, Aedes aegypti
acaacctggcaacactgctgtcaacagatgcaaaaactcttcccgatcgcttttggttttacgttttcgtgttcgattgacgccatccttgacttttcgtgaatttgtttcgtgaaaatccagtgaaaaacagtgccagaaccgtttgattgatgcagaaatcggtctccctgttccattatcttcagttatttttgtttttgcttcaattggtgccgcactaagcgcaatgatgcaatcaattttgttagttggacatcgggatagaagcagccatctgcagcagcgcaatcaataattgcctcatttccgcacaggaactaaagttttttcattcattttatattcaaacaatggaacacagctattctcgagacttccttcgtcccccaatggagaacagccaaacggccacgacgagggccctgatggtgcatcggcctccgcagtgcccttcctgccacacccacagccatgacgagcgtatcgacctggaggaatcgtacaatccgccgattccgtcctataacgaggaaagcgccaagattgcgatgatggagagcgaaaatgtgaccaaacatgtgcgcaaccttaacttcgaggagctggattgggaggagaagatcaacaaacctggttggtccgtccagcagattcgattgttcagtaaaataaccaagttgttggacatggatagattggcccggttgaccatcgccgacaaacagcacgaaccggtccaccgtcgaatggtcatcgacaaatccgttgggcgtcttcgacaagctctggccagcgtgtcatgggagcctcggctgacccagtggattcacggattgctgatggagagcttacccccgagttatctggccgcctatctcgacattttgcagaccttgaaggcaaagctacccaatctggtggacaaaatgatctttggaagaacgctaaacatcagccaagaactgctcggaccggtactcaagaagccttgggagccaatagtggcgcacaagaacagaaaacttcctggtcaaccatatattgtggttgttccatccggaccgaacatgacttcacccagtacccggctgcaaaagtggttttcgctgttcgccacgatggcttccgtcattccgatcaccatgccttcacaagggaacgccgtgatgaaacagtcaatccagaacgtttcggagcaaatggtcgcagtgacgagggccaagatccaagaagtccgccaggaagcgcccaatcggccaatcattctggtgggtttcaatgcgggagcagcactagctgttcaaatcggtctggtcgaagcggtcagctgtattgtgtgcttgggattcgcctacaatacagtgaatgggcctagaggcgcaccggatgatcacatcacggacattacggcgcctgtgctgttcgttatcggtcagatgtcggcgagatcgagccaagaagaaatcgaactgcttcgtgaaaggatgatcgcacaaacttcgctggtggtggtcggttccgcagacgattgcttgcgagtgtgtaaatccaagcgtaagatcgagggtgtaacccaatccatggtggacaacatggtcatggatgaggtggccgaattcgccaccaactgtctgctaaaccccccgagacctaagcaaaccatcaaagaccccaacggacaaaaatccaacctattgttgtccaacaatagcagcaacttggcggccaccggaggaccccctccgattccggttggtacaactggcgcgactcctactcatccacctcctccaatgcccggtgcgtacaatcgtaaacgcaaaatgagcccatctgcagacgccaacgatccgtcgaaagcagcccgacccaacagaccgccgccgccaccaccacaggcggttcagagaaaacctaccaagtctcagaaacaatcgcgagcggagaagatgcttctgcaacagaatcaacaggcactggatgcggccattcagagcattcttccgtcaacgggcaagccatctcctgtgcccatcgtaagcaaaccacagccacagatgacaaactatcagattaccagtggcaataatctggaaattcgccattcgtctggatctcaagtggtatccggtgtgggcagctctcctattgtattgcccatgataaaacgagataccacaaaccaaccactatcgacaattcagtctgctacgccttcgacaccttctacccccgacattaaggtgataccggcgaatcagttcattcaactgaaaccttcgggatcgacgcagaagttcgtcactctcaaatcatcgccaaaaccagtcgtgtcggtaattccaaagcaacccatttcgtcaactcccagtcctttggcgaagcaaacgatggtacaatcaccaatccttccccaacatcagtccttcagtcctaccaaattcactattgttcgcacgtccactggtctttcaggacattctacaccctcatcaacttcccctataaaaaccatgaggtcccctccaactccagacctttcaaacacaagcatcttcgatatgcccatcgtatttgccgatagtgatggcaacatccctgagggttctccacaaaaacacatcgacataacttcaaaacctccccctaacattataaccatcggtcctgctgtaaccagccatcccatgctgaaaacggaacccatgaaccgcatcatcacgctccagccctcaatgaagcccaacaaagtggtcgtcatcaacaagagcaacatgaaacaagtcccacccaacgtcttgtcttcggtgaccctcaacaaatcgacctcgatcaccccgaccggcgtaaaatacgccaaagtggtcatctccaacccactgaacaaggcgactacttctacagcttccgctcccaccataatccccaagaacctcactcaagtcctttccaaccaaaaaatcgaaatcctcaacaacacggttgtgaagcaagcacccatgccctccacatcccaccagcagcagaaattccaacccgtcatcatcaacgtggaccccagcaaaacaaccacgatgaagaacttcgtgcgcgtaggggaaacccaaatccggccaataggcagcagcccatccaccatgaccatcccgacgaaggtggcctcgccggccacagtcgtagcttcgagtgggtccgggcaagccgcccaattggcccccggtatccctgggacgaacaccatcctgattaagacgaactccctgtcccagctggccagccggaagccggccattctgaaccgcaacatcacggttcgcaaggtgaacattgtgccacagtcgcaggccggtagcgttgcaagcaccgttgtgatgtcctcggtacccaacaagacgacgacgtcgaccatcaacgtgcaacagcaacagcagcgccaccagcagcagtaatcgaaggcaccgtagttttactgtatgaaattaatcgatttctattggaaataaatcacgtagtataactagttcggtaagtacacaaa

SEQ ID NO: 688 - DNA, 1225 bp, Aedes aegypti
acgttttacgagtatgctgaaatgtccaaagtgaatggaatgtactatttgcgaaaaaatgtaacttctggttttcctcgacttttgtgggtactgataatcggtagtctgtttagtttgggtgttgtgttggtgattcttctgtggagaaaatacgtcgattcaccaacgcgaatgacggttgcatcagaaatgagcatcctacaggtgccatacccggggatcaccatatgccatccgcaaagtgtgatggattacaaggctgaaaaacttgtggataaactaaaatttcctctcggagcaacaagagcaagcgtccttgagaatcttcctgctttgggatacttcaatgaacatcaatggacttttccacgtcagcaaaacgttaagatgatcgacgcccttctagcgatgaacaatctcagcattgtgaatgccatcgacgagctgggaactatctgccgggactttatcttggtttgctattgggcgggtagaaagttcccctgcttcgataaacatgagttcttcagctggattgactctactagtcattatggagcgtgctgctcgttcaactatcatcccagtgtgcaggaaaccattactccatttgctgtgaacacatttggagtccatgggggattaagtgttataggaactggataccctcaagcatcggacggtaaatcgggagccttgtactcggaaggattcatgctgatgattcatcatcctcatgacttcgcagtggaatccgcacctctgacacttttgaagcttggaacggaaaccttcatcagtgtatcgccaacagattctcgctgttcgtcacaggttctagtactgccgcagtcgcagcgatcctgcattattggcaatgatttccctgttccaatcgaaaattaccgtcagcctgcctgtactctggagtgcctacgaaacgaggttcaccggaagtgcggttgtcatccttatcatctacctcgtcagtcacagattccggagaacatcaaacctatacgaggatgcacagtctttgattcgctgtgcctgattgacaatttttatatgctcaaacgcctcaaatgccaatgtcttcccgcctgtagtgatgtaacatataaaacgtcgtcagtggttacggacttctcggcgcacaaatattctatgaacacattctagtgagataaatgcagcgaatactgctactgcattcatcatg

SEQ ID NO: 689 - DNA, 1501 bp, Aedes aegypti
cggaggcggtgcctgtggattgagcttgagcgatccggaacagcacgtggcaggcgacagcgataacgacggcgacaacgacagtatgaccaactcacagctatggttccgcggagtgcggccctccaagttccggcacgtgtacggtctgcccacgcggaaggagtgctgctacaccgatatcagtgtggtccgcagcggcaacgatggcaacttctgcgccatcaatcccacattcctggccatcgtggccgacacaacgtttgtggtcatcccgatcaaccaaaccggacgaatcgatttccagtgctgtaaggtgattggacacaccggtcaaatcttggacctgaagtggaatcctttcgatgacaatatgattgcgtccgcttcggatgattgcacaatcaaactatggaaaatcccggagggtggattaacgagcaatctgagcgaatgttccacagaactcgtcgggcataagcgtaaggtgctgcacatcgaatggcacccaacggcggccaatgtgctgattagcgctggtttcgatcacttgatttgcgtgtgggatgtgggcaactccgacaagcccctgctgaacgtgatcaattgtcacgttgacatgatctacagtttggcgatcaatcgtgacgggtcgttgatagcgaccacctccaaggacaagaagctgcgggtgattgaaccgcgcagtggaatcgttgtttcggagggcatctgtcatatgggaacaaaatgttcgaaagcggttttcctggacaacgatcgcattctgacaactggattttcccgccattcagacaggcagtatgccgtgtggaatcagcatgacttaaagaaacctttggtgcaggaagtgatcgatagctccagtggagtggtcactccatacttcgactacgacaccaaaatgatctacctggcgggaaagggagacggcaacattcggtactacgagttggtagatgaagcaccgtatgtgtactatttgaaccagtttctgtctggacaaccccagaaagccctaggattcatgccaaagcgtggcgtgaacgtctcacaatgcgaagtgtttcggttttataaactccacgcagctggaaatatatgcgaacccatttcgatgatagttccgcgtaagtcaacgcttttccagagcgatctctatccggatacgctggccgacataccggcgattggtgccaaagagtggttccagggacggaacgtgcaacccatgctgaggtcaatgaagactggcgaatccattctggacgcaaatgccaatcagaaaacccgcaacagtgaaagcaaatatgccaccatccatcacaccagcagcaagcacaatgtcctcaacaaccaccacggcaatcacaacggaaatagcaataaccatagccatagcaatggcaccaatggcacggcactcaacggcagtaactacaccaacggtaacagcgtaacatcccttaccaacggtggc

SEQ ID NO: 690 - DNA, 1915 bp, Aedes aegypti
cagaaatcaaataaccgcaacagtcagtcgctgtcggcatcgtttggtgcgggtggttccagtccgaataatgacatctacatcgacgacgaaggcctcgagggttccggaagcagaggagagattcgcgacgatctagagaaggaagacgacgaatcttccggctccgggtacggggacgatgacgaggactcgtccgcgcgaggttccagtcgtagcaacagcaacaccggcatctcgaacataggcctcggcggcggcggaagctccaagggcgacagcggggacagaagctcatccggcggagcaggtggttccatcggcggcggaggccacgccggatcaggtgatcatgagctcgacgggcgcgaagatgacgatgaagatgatgatctctacactgagaccaaaagaccgtccattgatctgggcccgaccgacgacgaagatatgccaatcgacacgagcaagtcgggcggcagcgtaacgcacggccagggtcacggtcacttaccggacggaaccgatccggagatctacaccccgcgcattccgccaacggagggcggccacgatagcaacaacccgtacggcggcagcggagtcctgatcatgaacgccaagaatgaggacaggactgcgagcttcttcgcgcagccgggcattctcgcagctgtgattggaggtgccgtagtcggtctgctctgtgccatcctggtggtgatgttcatcgtttaccgaatgcggaaaaaggacgaaggcagctacgccctggacgaaccgaagcggtccccaacggccaacacctacgccaagaacgccaacaatcgggagttctacgcctgagactactcgatcgactccagtgacggtgatttgtaagctgcgttcgtgtacgaatcttgtgcatcggcgttgctctctctcactttccgcaaaagcaaaacaaaaaagaaaagcatgctaacttctgttgatttgagagcggtccagcggggatggccatcagtagtggtaaacggaacaaatacgcacgtgcgttagaatgtagaacaaaactagtaactcaaacagaaagctgcgggtagattgctttttaagacgtaagaaaagaaaaacttaccgagaagaattctgacttagggcaaaattttaatggaaacgtattgaagctgagagtgacggcggcattttacacaaacggcgagtcacaactgaactgtagagtcgtgtcgacggagtatattcagcagaagaatttcagtaaaagatttttcacggtgcgatttaatgttttagtaggcgattgattggttgttcaatttttttgtgaccgataagtagcgagagagagcgagacagcagagggacccacagtaggcgcgggtgcggtgcacctgacgcctactgggagcacgattatacaaatttttattttacttttcggtttatttcaagcaaatatttgtttagtaggaatcgtggcaactgttttttcaattctttttgcgagtaatgtaaaagataaaaagtgtaacgttgcagcatttattacggatggcaggcatatttactcattctcatacgcagtgaattaacgctgaagattgaaaacaggcaaagttttaacgtgtaaggaaaaggctaaaaatcgtttatataggagtaaatagatgttacatatttataatggaatgctttgcgatggagaagtggaggcaaaacagagaggaaataaagtttattttattttttgattcgggtcgccttcttttctgttctagcgtcacggcaattttattttcgaacaaaatgtgaagaaacatataggaaaaatcttaaatactaaaaatttcatccgtaaaaggaagaagacgattgatactttattgttaaagtatggtaattataatac

SEQ ID NO: 691 - DNA, 1017 bp, Aedes aegypti
atgcatgcatggatcttgattggtgactcccctttcggcaaatcagaagcttacatcaaattagaacaacttggagaagggtcttatgcaacggtatttaagggttatagcaatttaacgaatcaagtggtggcgttgaaggaaatcaggttacaggaagaggaaggtgcgccattcacggcgatccgggaggcgtccctgctgaaagaactgaaacattcgaacattgtgacactgcacgatatcgtacacacgagggaaacgctgacgtttgtgtttgagtttgtgaataccgacctttcgcagtacatggaacggcatccgggtgggctggaccatcggaacgtgcggttgttcctgtttcagctactgcggggcctctcttattgccataagcgacgagtcctgcaccgggacgtgaaacctcagaacctgctcatcagcgagatgggtgaactgaagctggccgatttcgggctggcccgtgccaagagtgttccaagtcatacgtactcgcacgaggtggtcacgctgtggtatcgacctccagatgtactactagggagtaccgagtattcaacctcgctagacatgtggggcgtcgggtgcatttttgtagaaatgatcactggtatgccaacgttccccggtatccgggacacgtatgatcagcttgacaagatcttcaaaatcctcggaacgcccacggaggaaacgtggccaggtgtgacgcatttaccgggctataagcttcatatgttaggtttcttcaagtcccgcaagttaggtttaagttttccccgtctgtacgatattatcgagggtgaaatgatggctagtgctttcctacaactgaacccagacaatcggataagcgccgatgaggcgcttcgacatccgtattttgctccgttgccaaaaaagttgtatgaacttccggatgaaacgtccatcttcacggtggaaggtgtgtacctgcatccggagccgaatcgccaccaccaacaccataaatga

SEQ ID NO: 692 - DNA, 1134 bp, Aedes aegypti
atgctgatcgaagaactgcatccggaaagctcctacaaacttcggatacaagccgtgaacgagatcggaaacggttcgttctcaccctttatcaaattcaccacagcaccactgccaccgaaaccaccaaaactggaatgtattcagttcggattcgcccatctgaagctgcgttggggcgaaggaaagaatctagcggacctcgctcgatattacgtcgaagtggagaacaatcgcaccggggagtatcagaacgtttacaccggaactcgaagcacgtgcaaggtgatgaagctgcacgaactgaccgcctacacattccggatagcagtcgaaacgaaacacgccggtatgggcgactattcggaggatttcgtgtttgccactttggccgccactccgaacaccatcaaggcaccgagagtgtacatcgaaccgctgggaggcagcatgaacagctcaccgcaacatccttcaagctcgacagcgttgaacggtagcgttagcaatttgaccgcggtgcagggcagcacgcacctcacgaccgggtcctctgcgccggggatggccctgctgaccatcgagtggcaaactagtcggaacaacccattctccgacccgatcgagtacttactacacatggcgaaggcgaaagatcaagagtttagcgaggtttattgcggccccggcacaaggcacaccatccagaatctaacattcggtcaaggttacctattcaaagtgtgcccggtgcgcattcgctccaacggcgaggaaatccacggtcagttctctccggttctgcaccaccagctgactccgcacaggatttcgatttcgcgccactcgggccacgatgaggtggacggatccggcaccaagtactacgcaggaaacgtggtcaaccggcgaggggagttgatcctgaatagctccgattgccaccatcattccggttccgctgggtatgctagttcaaatgtcaacgcgaaacaatctttactgcacctgcccaagggcggaaatctggtgcaaacgatatcggaactgctggaaaccgattccagcaaggcggtggtcggcgttctggtgtttattgtgctgtcggtcattgttgcagcttttctaaagtga

SEQ ID NO: 693 - DNA, 2583 bp, Aedes aegypti
ctaatcaacgatggccgatgtcgatgtgatgcgtacccagaccgtcgaggtcaagaaaacgcgtaaagtgaagaagacgactaccaaacgtcgggagtcttccgatcagaccggagaggtcatgatcaccgagatggagcagacagactacaccacgcagaaccagaacgccatcgaagataagggtggcgagtacaccaaggccatgtcgaaggattggcattcgggtcacttctgctgttggcagtgcgacgaaagtctcaccggtcagcggtacgttctgcgtgacgagcatccctactgcatcaagtgctacgagaatgtgtttgccaacgtttgtgaggagtgcaacaagactatcggcatcgattctaaggacctgtcctacaaagacaagcactggcacgaagcatgcttcctgtgtaataagtgtcgcatctcgctagtcgacaaacagttcggctccaaggccgacaagatctactgcggaaactgctacgatgcccagtttgcttccagatgtgacggctgcggggaaatcttccgtgctggaaccaaaaagatggaatacaagaccagacagtggcacgagaagtgcttctgctgctgtgtctgtaaaaccgccatcggtaccaaatcctttatcccccgtgagcaggagatctactgcgccggatgctacgaggaaaagtacgcaacccgttgcatcaagtgcaagaagattatcaccagcggcggtgtgacctacaagaacgaaccgtggcatcgtgagtgcttcacctgcacccactgccaggtgtccctagctggacagcgcttcaccagccgcgacgaaaagccatactgtgccgagtgcttcggagaactgttcgccaagagatgcaccgcttgtgtcaagccaatcacaggaatcggcggtacccgtttcatctcgttcgaagatcgtcactggcataacgattgcttcatctgcgccatttgcaaaacgtcactggttggccgtggattcatcaccgatgaacaggacgtcatctgtccggaatgtgccaagcagaagctgatgtaagatgttaaaaaaacaaaaaccaacccgtcagtgggatttcactaaacaaaattgtacacaaatcttcacacaccccaactcacaacacattgtagaaaacgaaacacaaaaaaataaaaccatttctctctctaaattgcaaacgaaagcaactgaaactattgttacaacgaaacaaaaaaaaaacaaaacaatgatattctaaaagcaaacaactatgtgttttagaggaattgaaaatgtatatgttaattcgatggatgaacaacaaaactaccacagcagtgaagtagtctttcacagtgtactagaattgtcaaacgacccggtggtggccatttttaaaagcgcttttccgaatattttatatggtgtcattgttgaagtcttttgaaaacaaagatcactcattgcccttcattttttaaataactgtcgcttcaagaacttgttttatggttagattgaaacgataatttcctcgaacaatcgataaaatgtattaaacagttgaattgccataagaatgttttcaaaggacacagatttgataatatatttttttaacgtgtgcttaaaatatatcttttatcgaaaacttttattctgtgaagacagttttaggacgaaaataagtagttggctttattttagcagagacactttcaaagcaacacaaacactcacacaagagattagcgggaacggcctatattcacaaaagttgccttttactaagaacaaaactataagaaacaaacatcaaaacctacaccttatatgaacaggagacaaattttaaataaaatacgattgtcgttctagtttttaacggctttttatcgaagaaatgagatgaacagaaacaaaatattaaaaaaaagtatttaagagagtagaacgcaaaaaaatgctttcacaaagaaaatatatccctaatattgatcgcttatcttcccctctttatgttatatgttgttatttctaagcttaaagaataaagaagaaaaatcaattattacctactgttaatctaggcggtcgacgaaagaaagaaaactgtatttaaacgaaggcagaacattattattagagcactctatcagagatgattgacttaacatttactaaagataatcctaatcctagaaaagatgaaccagaagcaggaggaaacaaccctcgagagtaggatagcgcttaagatcatgactcattgatctgtcccttctctgtcacatcagaagcagtatcgtataacgaatatttttattgattaaattattatttattcatattaacacctcgattaccattatgttgataacaggaaactttaggaaaggcaaaatgcctgtgtatatcgtacggaagaatgctggtggttaaaaaggtacatacatataaaaaagtatatcaaatcagaaaaaaaacgctaataatttcacctcttctttgttattattaataattttagcgatagttggatttttcaataaataaattatctcttcgaa

SEQ ID NO: 694 - DNA, 3876 bp, Aedes aegypti
agtttgaaatacagaactactgagctactaaattaactatgtgagaaagcgtaaagatgtataacgttgcgatgaactgtttcccaaacaagtgctataattgaaaatcaccaggtgttacaaagttttgaaaacgaatcgtgcccgctataatagcaagcgtgaagaatagaagcattctgaggcaatagagagtcaacgaggatggatgccaccgcttcgggcggtgtggtgtctccgatggcaagggctggcagtatgctggccgctgctatggcgcaaaatgtgactgccgccattactagtgccagtaccgccgccattgatgatccgtacgtaaccagctccatgatgcccccgggagttccgaccagcaatgatagtataagcggcggtggcgacgatgatcagccgagcatttccatggataatctgtacccggcgttggtgcagtgtttcgccatcatcatttgcggctaccttgccggacggctcaacatcattaccaacaccgaggccaagggcctcaataccttcgtgggcaccttcgctctgccgtcggtcattttcctctcgctggccgagcttaactggagcacggtcaattggaactttctgctgtcgatcttgatatcgaaaacgatcgtattcctcgccgtggccgtcatctcgctgctggtggcccgccccatcaactatggccgagccggaatactggccattttctgcacccaaagcaacgactttgccattgggtttcctattgtgacggcgctgtactcgaagttgcatccggaatatgcgtcgtacatctacctgttggcgcccatctcgttggccgttctaaacccgatcggctacgttctgatggagatctccaaaattagagcgaaagcgacggaagaaacacagactcttcagcaaacgcgtcgcccatcgatcccgccctgttcccaactggccgatgccggcaactcaaaccgcaaattcctgaagggcaaagttctagtcgttatcaaaaccatcgagtcgatcttcttcaacccggtgctcttcatgaccgtcttgggcgtaatcggaggacagatcttccgcaacggcatcccaaccgtcctcgccagtatcctgcaagccttgggcaactccttctcagcgacatccctgttcctactaggcttaagaatggtcggccaaggggccaccctgcaagggccgggcctcatcctaccgggcatcctgattttagttaagctgttggttctcccgttggtgacccgacaaaccgtgaacataatcggtgctggagcaaacttctccgaaacgacggatctcagcacattcgggttcctgtacggaacgttcccctcggcaccgggcgtcttcgtcatagcctcgcagtacaatcaggacgtggatctgatcgccaacagcatggtggcgtcgaccttcatcagcgctcctctgatgtttatttcggccaagatgatcacgatcaccaatctgaatccgtccgattatctgaacgagctggacaagttcgcgttcgacatcagcatcgtggccatgtgctgctcggtgtggatgctggtgctgttcacgctgacgcggaagatgaagaagatgccgcatcggataacgagctgcctgatcatatcgcagctgatctgtaatattggggtgatcatgtggtccacgttcgatcagaactccggatggaaaatgtatctgcagttttacttcttcacaattgggtgctacagtagccggctgtggacggcgttcctggctataacgattctgtttctgcagtgtcggagtctgtgcttcgtgctgaagctgtggccgatatttattgccgcagcttggggtctaccaaccatcatagtatcgcttctctttctgctggacacgaagaacatcactccaacggagaagcgcaacccaagtttccagtacgggaatgcccaggccgcgatcgccgtatttcttctagtcatgtgcttcatcgttaccgtgggctgcttgatcttgcaccagcgattcaagaaacggcacgaaaagtatatgaccctctcgagggaggtgtcctcgccggaaacggacacgagtaccctaggggcgtcgtcggtaaccaacttgatccagcaatctccgacggcggggggtcatcacagccggacggtgcacagaaggcgtccttcggtcacttcgagtgatgatgaaattctgagaggcggcagtgggggatgcggaggttctaatggcgggggatgttgcagtgccgggaacggcggtggaagttcaaatgggggtcgaactgttgtggacattgaagatttggttgttcaacaaagcgtgaacaatgatcttgaaaacgaggaaaccataacatccagcggaatgtgttcggcgcagttcaactgtccgtccgcctccaaacagcagtgtcaatcgttgattgagcattaccgcgagcaggctcgcgacggtctggaaccgctcgagttcgacaaaacgatcgacgagcatcaaacgctcaagcacatggtcctcttgattctactcctctgttccatgttcgtgggtctggccctttcggtgtggaccctcatcatggaaggcatgtccggaatctacgtcgagctgaccttcctggatgctttcctcaactttggccagagcattatagtgctggccgtattcatcaccgacaccggagaactgttgctaccgttgatgaagttttggcgcaaggtctggtacggagcgaatctactgcagcttccgatttggagcgagctgtccgccgaaacgcgacacatctgcgatcagtttacgacgcatcatctggacaattgtcgcaaggcgatcgccagggataagagatggcgcatccgtatctacaagaaggtgttttacggcaacgttttcgtcgattggctgatcgaggtgggtctggccaaggatcgctcggatgcaacgcactatgcgagacgcttgatcgatggccgggtcctgcggcacatcaacaatgtgtaccacttccacgatcgcaacctgctgtacacgttctgcgatcgtttgtaggttggtagtgattacatcgccttgaatcaggaagaccccccaactctggagtgctttgctttatctcgcagcagccagtatttctaaggatttatagaccaaaaaactaatgataaatcgaatctatctaggaatagcaaggaggcacaaccaagaactccaagagtattctattttcccaaaaaagagacgaatcgtaaccggttaccaaaaagaggatcgaaatggaaagtattgtgatgactacgacggtactcgtaggttttatttgtttagctagttttattttgtaaggcgaattttgttaaataattcctagtttagatatttattatcctatatgacttgtcgcgcaagaagcggtaggtatgattgagcagcatcgtgattcgtatgattgtaaatattttagactttctagcgaaaggaccacagtaggatgaaacaatgtaaatttaacatagaatattttatgaatgtagtaaacgctttaaaggttctcaatcattacacacacaaaaaacttggtctgatacaagctacaaatagaaatatacaaatatgaaatatttatagtattgagcaacataactgataggctagagcttcttttatttatttttgatgacaaatccttagagatacatagatcatgtattttaactatataactatataagaagggaagagcttgtacacaaattttgcaatacatatagctttgctcatacatacaacgttgaaatagaagagactgagtttatttactctcacttagagcaaacctcc

SEQ ID NO: 695 - DNA, 10568 bp, Aedes aegypti
agtacgacgtgcggcatttcttcatgatgataaaaatcatatcaattgcagaaaaaccaatttctatttttgcagaaaaactttttctttttttgtgttcaataaaaatgtatttttaaatgattcttagatagtagcatatggtaatggaaaaccatgctctatgtgtagttccatcgaggtgaacgagctagaaggtcaagcaaaataatatctcaattcatgttggaaactaatacagccttcataacagaccaatccaagtttatctcgataaatgttttattattctattcaagaccgtacctcactttcaaaacatagctcccaactgctttgcatggcgacatgccatcgcctttacacagacagcaattgatgtttacagctggccttgaacgatggtcgaccacaatcaaagttcatcgctgctgctgcttttgctcttgctgttgcagtaccagtagcagcggatgtggtagctagctagtacccgacctattctcaaatgctgcgattattcagctcggcctgagctttatgacactgatggtttcatattttcgagtcttcgtaatgtttgatcaatacacaccgaaagcatttacgagcgtcgaaattcagttcatacgaaactatcagcacgcgacatgtgaatcacaaaacaaaacgaaataaattgattcgtgacattcgacggtgaattggtgttagatataactagacgttcgattttactagcggagtgtgacgcgccagtaaccgtagtcgaggcagcagcgtcagaattgtaaaatcgattggcacaaatcagttcaacgactgattttagttatcaagcatctcttaccttcacggggcctcgaaattcagagcatggcgtgtgactgaagcgaaattcaaggtttcttcatgatccaattagcacacaactgtttcagtagctcgttgcacaatcttatctctctgcctgcatcgcgttgtcttgccgctgtgtctgtgagcttagataaagcgaataactaatttgtgtctgtgtgtttccttaccatggagtgaccggcagattatatttcaaaaacgtgtaacggctttgagctgcaattcggcgcatgtatcaaatactggatgggtgacgttgatccagaaacgctgctagaatggctgtcgatggggcagggagacgaacgggatatgcagttgattgccctggagcagctatgtatgcttctgctgatgtccgacaacgttgatcgttgtttcgaaagttgtcccccgcgaacgttcctcccagcgctgtgtaaaatatttttagatgaactagcgccagagaatgtactggaagtgacagcacgtgccatcacctactatctagacgtatcatccgagtgcacacgtcgcattgtagcgatcgatggtgcgatcaaagctatctgcaaccggttggtggtggccgatctcgaaagcagaactagtcgtgatcttgcggagcagtgcatcaaagtacttgagctcatatgcactcgagaagcaggggccgtgtttgaaggaggtggacttaattgtgtgctttcattcattcgggacaatgggtctcagatccacaaagacacactccactcggcaatggccgtggtgtccaggctatgtaccaaggtggagccacaaggtgctaatgtacaaacttgtgtagaaagtctaagtactctgctacagcacgaagatccgctcgtagcagacggagcattgaaatgctttgcttcggtggcagatcgatttactagaaaaggagttgatcctgccccacttgcagagtatggactagtaactgagttgttaaatcgactaagcaacgctgcaggaccacaaacatcagccttgacagccggagctagttcaaatgcgacgcccgctgcacaggtcaacagtcaagagaccacaggaacagtgcagctttcatcgtcagcaccaaaaacacagggagcagccgaagcagggcgatcgagtcaatcgatcgccacaactatatcactgttatctaccttgtgtcgagggtcaccatcgatcacgcatgatctcctccgatccaatctaccagatgctatggaacgagccttcaaaggtgatgaacgatgtgttcttgactgtatgaggcttgccgatctcatcctgctgctgttgttcgaaggtcgacaagctcttggcagggtgggtggatctagcggtcagttagctcctcgtgtgcgaagagcagactctagtactgagcgaacacatcgacagttgatcgattgcatacgtagtaaggacaccgaagccctaatcgaagctatcgaatcgggtggaatcgatgtcaactgcatggacgatgtcggtcaaacattacttaactgggcttcggcctttggtacattagaaatggtagagtttttatgtgataaaggtgctgacgtcaacaaaggccagcgaagttcctctctgcattatgcggcctgtttcggtcgacccggcatagcaaaagtactgctcaaacacggtgccaatcctgacctacgggacgaagacggcaaaacaccactggataaggctcgcgaacggccggatgaaggccaccgtgaagttgcttccattcttcagtcgcctggcgaatggatgaccgcggcaacacgatcggacttgaaaaccgaccccgaagacggggaaagcgagccccgcggagatccggagatggcacccgtctatctcaagttctttctaccaatattctgcaagacgttccaaagcacaatgctagccagcgttcgacggtctagtttaggtttgatcaagaagatgattcaatatgtccaaccagaaatgctgtcgaggctttgttcctcggagggcctccaaagtcatgagcacagcctaggaactttactagtcgaagtcgtcgccagtgttttggacaacgaggacgacgaagatggccatctggtggtgcttaccattatcgaagagctcatgtccaagacgcaagacgatttcctcgatcactttgcccggctcggagtgttctccaaagtgcaggccctgatgggagaaaacggcttcagcgggggcgaaggtgataacaacgatgtgatcaaatcccaagacgagctcaaaccgtctgcgaccggagcacaagatgcctcggttgtctccactactggaagctcctcctctggaactgccactactaatacggtggaagatgccaaagaaatccttcccgggaaggcgtaccactggcgagactggagtatttgtcgaggtcgcgactgcttgtacgtgtggtcggattcagccgccttggagctttcgaacggatccaatgggtggttccggttcatcctggacgggaaattggccactatgtactccagtggtagtccagagaatggcagtgatagctcagaaaaccgtggtgaattcctagaaaaattacaacgagctcgcggagcggtacggcagggaactccctcccagccgattctttcgtcgccgagcctttcgcgaatcgtggtcggcaattgggtgctgcagagccaaaaagagcatcagctacatatcaacaactccgaaggtcaccaggtgacgatcctgcaggacgaactgcccggattcatcttcgagagcaatcgcggcacgaagcatactttcacggcggaaaccactctgggaccggacttcgccgccggatggatcaacaccaagaagaagaagatgcgttcgaaggcggaggctcagaaatatcaggttaaaaacatcgcccgagatctgtacaaccggtatttcaaagcagctcaagccgtcccgcggggcgccgtggcaaaactgtgcaccatcgtgcgtcaaatcgaggcagccctggaggaacaatgtgcccctaaggcgtccagtttgctgcaggttcggattcaacctgacgcttctaaagcaacgaacagtacatggcaggagaagctgtacaacgctctgcacgatctggtgcaactgttgaacgacgatggagtcatcagtgcttacgagatgcacagttccggacttgtacaatccttggtggccgtcctgtcccggaactactgggaactcgaaatgaaccggagcaaggccaacaagtaccagaaacagcggatatccattttcaaaaagtgcatgtatggcgataccaaaaatggcaaaaacacggccagcattctggtgcagaagttggtatctgtattggagagcattgagaagcttccggtgcacatgtatgactccccagggggtagctatgggttgcagattctcacgaagcgattgagcttccgacttgagcgggcagcttgtgagcaaactctcttcgataggaccggtagaaacctgaaaatggaaccattggcaaccgttggccagctgaacaagtatcttctgaaaatggtagcaaagcagtggtacgatatggatcgatcgtccttcttgtacttgaaaaagctgaaagaggcaaaaccaggaagtgtacacttcaagcaccagcacgatttcgacgagaatggtcttgtgtactatatcgggacgaacggaaaaaccacggaatgggtcaatcctgctcagtacggattggttactgtcacaagtagcgaaggcaaacagctcccgtacggtaagctggaagatatcctgtcgagagatagcgttagcgtgaattgtcacaccaaggataacaagaaatcgtggttcgccatcgatttgggaatgtttatcattccaactgcttatactttgcgacacgcccgtggctatggccgctctgctctgagaaattggatgttccagatgtcgaaggatggaataaattgggcgacaatgctgacccattcggatgataaaagtttggcagaacccggaagcacttgcacttggccactcgaatgctctgcggaagaacagcagggatggcgtcacgtgagaatccatcaaaatggacggaatgcttcagggcagacccattacctaagcttgagtggatttgaaatctacggaaaggttgtctcggtttgtgacgatatgggaaaagctgcggccaaggagaatgaagctcggcttaggaaagagcgacgacagattcgagctcagttgaagtatatcactcaaggtgcacgcgttgttcgaggagttgattggcattgggatgatcaagatggaagtcctcctggagaaggaactgtaactggtgagattcataacggttggatcgatgtaaagtgggaccatggtttaagaaactcctatcgcatgggagccgaaggcaaatatgatctgaagctgtcaaacagtgaaaacctgactgcaccttacgatatgaacaactccggtgctggacttgttccaattaacgctggaagcgtatcttcggcgaagaaagtatatgataagtcgttgaacgttctgaccagtcgcaaatcgagctctactccgagcctcccggaagcaacggagaacaagtcatcagtagcttcgactgaacaagccacttccgtggataaccttgcatggaaacaagccgtagaagtgattgccgaaaatgtgctatcctgtgctcgatctgatttggccaataccagtggtggaagtagcagcaatgacttatccgctcccggatccaacaataataatctgaacaaccaggaagtgtctgtgattgtccactcgttgggagagcggggaaacatcccagatctgtcgcaaatcaatacaagtacttcgactctagtctcggatttggccaccatcacggagaatctaacgctttcggataacatcaagaataacatcagcactggaagcagcacgcagtttgtgagcaattttggaacccaacttgcagcttgctcatcctcgtcttcgtccgaagacaacaacaaaaccaacaacatcaacgaaaccaataacaagatcaatctcaacaacagcagcagcagtagttccggcaaaacggcatacctgccaaccaagctcgacgtgttggacaaaatgagggaaggcgtcgacatgcttcggaacaataccaacaatttgctgtcctcggaattgctcacccagtcaaatctactctcgtccgtaaagattgcacttccgacgccacaacaaccgcagcaaactggagcgacagctcccgcaggacctttcttcgtggccagcacaagcaccagcagcacgagcactctcccttcgggtgataaaatcgttggagatgtcaagtttaacaataccatcaacaacaataccgcttccggtggcgtaacgaagaaagtcctgaacgaagtcaagcagcaggaaccggatgatcgcgacattgccaacaatctgaagaacaacaccattgtcgtcgattcggtggaagttggtgcagcaggaagttcgaaggaatcaactgctgagtcaccttcggcggcggtcacggtcaatccgatgagtgtgagtgtcccgaatctgacgagcaatgagaacaatgcttcacaagaggtccaaactccaccagggttgttggaaacgtttgcagccatagctcgaaggcgtacgtctggaagttctgtatcccatcatgtgaaccctagctcaaacgcttcaaccgcttcttccggaaccagtggcacaaacaatactcaacccaacaatcagctgagtagccttgggtccaatattcaagcagcgaactctagcttcttcccgaggggacaaaactccgttactagtctggtgaaattggccctttcgagcaacttccacagtggattgttgagtaccgcacaaagttatcctagtctctcgagttcgagttcgaataatgcaaattcggtcgcggtaagtggaggaactaacaacaattcggcgagcggcgtcggttccaacaatggatcggttcaaagcggaaacgtccaagccgtgttgaatccagcactgacgatgagtctcacctcaaccagtagcgatagtgagcaggtgtctttggaagatttccttgaacagtgccgagctccaacattgctgggagatttggacgacgacgaagacatggaggacgagaatgatgacgatgaaaatgaggatgaatacgaagaagtcggaaatactttgctccaagtgatggtttctcgtaatttgttatcgtttatggatgaggagactttggagaatcgtctggctgccgctggcaaacgcaaatcgtgggacgacgaattcgtgcttaaacgccaattctcggcactcattcctgcattcgatccgcgtcctggcaggaccaacgtcaatcaaactagtgatctggaaatacctgctcccggcagttctacagacagtagtcatccgagtagcagtcactctgagcatgctcctttgcctcaaccgtcccttgcacttcttctgcgtggtcccaacataaacggagtaagtgatgtggaaattccactgtcgcagcccgattggacaatattccgagcggtccaagaactgatccttcaaaccaacatgaccaagcaggataagttccgcaaaatttggcaaccaacgtacaccatcgtctacagggaagcctcttcttctgccggactcggttcctgccgcggtgaggacttcagcagcggagaagaaggacgggccacccccgtcgtttccatgttttcccaacgcagtggaggatctaccctttcgcctagctctccgatccccggaacaccactcaatccaaccgccaccgctcactgcactgtggacgacgtcttgcagcttctcggccagttgaatgccatcaatcgaacgcttacatcttctccatccaacaacgacaagaacctcatcccggacatggaatccaacaatctcaacgcggatatattcttgagcaagaaaattaccaacaaactgcagcagcaaattcaagacccactagtcctggcgagtggaagcctaccgaaatggtgcgaagacttcaaccaaagctgtccgttcctgttcccgttcgagacgcggcagctgtacttcaactgtacggctttcggcgcctcgaggagcatcgtgtggctccagtcgcagcgggatgtgaacctggaacggcaacgggctcccgggttgagcccacggcatgccgatcagcacgagttccgcgttgggcggttgaagcacgagcgcgtcaaggttccacgcggtgagaatctactcgaatgggcacaacaggttatgaaagttcactgtaatcgcaagtcggtgttggaggtggaattcgttggagaggaaggcaccggattgggtccgactttggaattctacgccctggttgcagctgaactgcagcgaagtgatctgggaatgtggctgtgcgacgatgaacctaagctaatcgaagacgaaatcgatctaggagagggaagcaaacccatcggttattacgttcgtcgttcaaccggattgttcccggcgccgttgccacaggaatctgaaatttgtgactttgtgtcaaactacttctggttcttgggagtgtttctggcgaaggtactgcaggacggtcgtctagtcgatctgccactgtcgaacagcttcttacaactgttatgtaataacaaatctctcgctagaggttcactaagcgaactttcttccaagtctgccttgcacgatgatgtgatgatttcttctttaatgtccgaggaaagcgatcgtgatctggtggattcatatcagtcaaaattggctaacgatggctgttggtatgatggaatcctgtcccaagaaaatctccaggaaatcgatccgattcggtacgagttcttgaaagaactgcaagagttggtgcagcagaaacaaaatatcgaacaaaatgatgatctcacctccgaagagaagctactgcaaattagcgagcttaaattcaacaccaaaactggcagtgtagctttggaggacctcgctctaacgttcacctatctaccaagttcgaagaactacggctaccaatcggcagatctgattccaaacggttccaacattgatgtaacgatcaacaacgtcgaagagtactgcaatttgacgatcaacttctgcctgcaagaaggcattgctaagcaacttactgcgttccatcgaggtttctgtgaagtgttcccgctgaacaaattggccgctttcacatcggaagaaatccgcaagatgctttgtggcgagcagaacccagagtggacacgggaggacattatgacctacacggaaccgaaacttggatactccaaggaaagccctggattcctgcgtttcgtgaacgtgttgatgggaatgaatgccagcgaaaggaaagcatttttgcagttcaccaccggctgcagcagtttaccacccggtgggctggccaatttgcacccgcggctgacagtggtgcggaaggtagatgccggcgaaggttcctacccttcggtcaacacctgtgtccactacctcaaattgccggactatccgaatgaggaaatcttgcgggaacgattgctgacggccacaaaagaaaagggattccatcttaattagaaaaatcgcagttttatgaatgcagaaaaaaaaacaccttgagctaacgatatcctacttcacaaacccacaaactgatgagcgtggattattattagcaaaataaacacatattttctagataatgaactcatctataaggtaaaaataaatcatgtttcaaacaagggatacaaaagattaatgaaaaaaaaaacaataatatatgaagtgaacaaatgacagctttccgattacttaaagttatcgatccgttgtggttttatgttataaaactctaaaattatgagaaccaatttctgcgagagaaaaaagcatacaacaatagataagataaatgcgatgaataaagcataaatttaaaaacccaaaacattttaagtttgctgtgagtagatgaaaattatacaccccgcttcaagtatagacttagttaaaccataaataaagattcaaaattcgtcagctttttaagtagtcatagtccaaaatcatttaaactgtacatacataaaagagaggacaaagaaccggtactactcgagagagtgcaaatgtggcacttctgagcgttacgtgattgatcagaaatttacttgttttcagcacgatattttcgaagcctaacaaaatttgtataatccaatatatttttaggacaaattttgaaccaccaccattgaacgattgaaaaaatagaatgattcaaacaactattggtcactggaagtttacacaacgttgaaactcacaaatacacaataaaagtagaatcgaaaattgacgtatacattatatagaaatgaatatgttttacattgtatcatggatgaaatcaaaattacctaatggcaacaacagaaatataaagcggctgaaaggttctcggctattatagaagaactcaaagtgcagtcatatgaaaatcacatcaataacgaattttaaattcaccacaaattaaacagcatgttgacacaaaaaaaaaa

SEQ ID NO: 696 - DNA, 3864 bp, Aedes aegypti
atgaatctttctccaaacagcatcaccgaaaccatgaccagtatactctctacaccgggcaaatatcgctcgcgtaaggatctcagcaccggttcgatccccacattggtctccctggaggaggaatctagtcttcacacagtcaccggtgccgaatcggaactttcacacagctatcacattcattcattggcgtcgcccaatggagccaccggaagcggttcgaatggaagctacgaaccgttctccaatgcactaaacatcaaaaatggactcagtgccaaatctccgcgacggagttcactagccataggcctccttggaggtcgcaacaatggtaacgccgaaaaaggcaacaaacgacgaagttccattgcagtggccttcctcggaggtcgtcgcgattccaagtctcacaatcacaactacccgatcgcgacgatccccgaaaagtaccacaaaacgaccgagtcggacattgaaaacgactcacccaatcactactacacggtcccagccggaagtgtcgctgctgtcctcagtggggaacccaatggtcagtccgaatacggtgggggcagtaatgggaacctcacggtgaacggctccggctatgataaaaagcggcgtcgttcgtcctcgtggcaaaccaaactggaacgacgccggcgcaaggggatgtcctcggcgctggacaatgcggaaggctccggcaatggtctggatagtttcggttcggcgaacgggctcgatgccttcaccagcaagtacgggcgcgaaaagcgacactcgtggtggaacattttcgttccggagaacctgaaacagaggacccgccgagctagtcaagatgtgatactgtccaaaagttcggacagcctcagtccaccctatcggaggagcaaatcgaggagcgttgatcatggattggctgcacccttcgatttagactctctgcggtccaaagtggagggccgcttcgaaagcatcgaccgactgactaaagatggagagaagaaacgctcgatgccgacaattccgaccacttcgtacacagtcggagacagggatacgctgacctcggtggcagcccgcttcgataccacgccgtccgagttgacccagctgaatcggttgggcagctcgttcatctactccggtcagcagctgctggtgccggacaagacggccaaggcgggatccggatcgggtgccgaaggggactcggatgccagcaccgaacggtcgtcacacagtcccaccgagggtcgccgcaagggatccaacgaagatctatcgcaggatgagaaagatctactggaaggacttcgtcccggatcacccaagccgggccacattgagcgtgttgcgtccccgaacaatcaaagtggtggaggaggcggaggagacacggcggcaggtttcagtgaagatgacccggttacgatccaacgtttcctcaaaatcaatgtgcggcacatcaccgatgggcagggtgtggtcggaggtgtcctgttggtcacccccaatgcggtcatgttcgatccgaatgtgtccgatccgctagtcatcgagcatggtcccgaaagctacggcgtcattgcacccatggaatacattgtaaatgcagccatattcaacgatattgcccacatgcgtgtgcagggtgctaccgggggtaacgaaacagccgagaaggctgaaatctactacccagtgccggagaagtcctgttcccgttgtgacacccattcacccggcaaggactcactgctggtgaaggacgaaactttcccggagctgggagttggctccgttgaaggctgtgacgatcaggaaagtatctgctcgagcaacgaacgcgaaggagatgccttcccgaaggccttcgaacgtgatctagtcacgccaaacaacctgcagcgcttgcatggcgattccaccgagagtggtggcagttcggagaaacctcccagtattctcgaggatccaacggtgcgcaccctggaggaacggagacgaagcttgctcgaccagcattgggccatcccgagtaaggatagaataaaatgtaattgcaataaaaccttatctcaaagatcgctggacgacgaggaagccgccagtacgggaagtggtgccacggccacctccagcggaacggctcctcctgccatcggagttggtgctggaggcgccggtgtggatgaagttgtggccgctgccggtggacaactggtcaaacaatcctgtcacgattccggaatcgatatccgggatcccaatacactgccatcggcggctgccggagcaggagctgctgcagcaaatcaagcaccccttccagtcgtggcaccgattcccaccaaaaaagtctacagcgatgcggacattgtgctcagtgccgattgggtgcctccgttgacgatcgccccttcacactgtatcgacagttcagcgagaacctcctcaaccacatcttcgcagcatagttccctgtccactacgcaagccgatgccgccagtcggaagaaggcctccagcgtgagcttcagcgtggaggaacatgatggccaagggggcacccaaggggacaagggtagtgaaactaagaagaataagatgctaaaacgactttcctaccctctggcctgggtggaaggcttgaccggcgaaggaggaagtaccacccacaaatcggattcgatcgagtccgctcccaacacaggagattccaatcaaagcgtattttccaaagttttctcgaggcgctcctcgataggcaccttcatcaggccccaatcgtcggcggaaaccggctcagccaccaagcagaaacaggcaccaccaaagctggactaccgttcgatggtttcgattgacgacatgccaacgctgtttgttagcttcgacaaactgatcccgcgaccggcccgtgcttgtcccgatccgccaatgtaccttcggttgcgcatgggtcgcaaaatcggcaagaacaccccactgccgaccacggtcatgtcctacggcaagaacaaactacgaccggagtattggttcagcattcccaagaacaaggttgatgagctctatcgattcttgactgcttgggttcagcatctgtacggtgaattggacgagaaagccatcaaggagcgtggctacgagttgatccagaacgacaccgattgggcaaccaagggcggaagtccaaccaaggatggacgatcagccagcgaaggcgaaatcaccgagtacacccgagaatcatgggaggttctgtctatgagcacagatgactaccggaaggcgacgctgtttgcaaccagttccttcgatcaagacttccagattccggacttgatcggccagacggagatcctcagcgaggagcatcgggaaaaactctgcgcccacctgccagcacgtgccgagggctactcgtggtccctggtgttcagcacttcgttgcacggtttctcgctgaactcgctgtaccgaaagatgcacaaactggaaagcccaatcctgatagtcatagaagatacggagcacaatgtgtttggtgccctcacatcctgctcgctgcacgtgtcggaccacttctacggtacgggcgaatcgctgctgtacaagttcaacccccacttcaaggtgttccactggagcggggagaacctttacttcatcaagggcaacccggagagtctggcgatcggtgccggagacggaaagttcggcctgtggctggacggtgacctgaaccagggccgatcgcaatactgtagcacctactcgaacgaaccactggcaccacaggaggactttgtcatcaaaactctcgaatgctgggcatttgtctaa

SEQ ID NO: 697 - DNA, 2916 bp, Aedes aegypti
atggctgatgataagtcactgttggccagattctaccacgcagatagagcgctaaccgccgttgccagcgagttggatagcttcgatggtcgggcagaaccagttagatgcactcggctagttggacggttacgacaaggacaggaccgcgttctggcgattaccaatcaaattatggacgagcttctgggtgacgatcgggcgccgcgagctttccgcgccaaatttccagaggaggttctacaggaaagtttggctggacagttatggtttggtgcagaatgtctcgcggccggatcatctatcatgaatcgtgaagtggagagtggggtaatgcgaccactagcaaaagccgttacgaaaagtttggacaatgttcgaaacttgctgcgagagcaatgccttcggaacaacacacccaacagtttgacactgcggttggatataaacgatgccgcgacggaacagttgtatgaaagtttgaaaatcttcgatcgcttgtttgcggaatttgaattgctatacgtcagtgcaatggtacaagtcaaatcgaagcaggagtacgagatgcaggagctcatatgtgtgcttttttccgaaacattgcaacgggctcttaaaattggacttcttgaacaggaacaggtggattcgtatgacccggcgttgatgttttccattccacggttagcaatcgtcgccgggttagttatattcaaggacggacccctaaacatggatcaaccagcagataacatttcagaaatgtttcgaccatttcgaaagctattgatcaaaatgcgagatcttcttcggacgctgaccaagcatgagctctatcagttggaaaagctgttgtgcaccaacgaggaaattagtctgaaggaagaattaatctgtgatgcaaacgaaaatgatagcagcgatgtcttgccacaggaagaccacgttgttatcgttacaaccaatgttaatactagtaataatagtgataatagtgatagccgtgtagacgattctccaaacgatgaactgcggcatgaatcggaaactcgggacaatcggaacagtagtttttatagtaaccgtattatagatagtaatcgattacatgcggacgtggaggatgatgtatccgaaaatgacgacgatgatgatcctagtaatgtattgaaagacagtctagtgacgacagattgtgcatcaggatatttgattccaaatacaaacttcggtaacctactgcagacgaatgaagcgcccttaaccgatagttttatcgcaacggacgaagagctgaagctgggaacctcttcaaatgctcggatagaacagatattgtcagagactaaccagaaacttgcggattctggacttggcactgccaacccaagcgtagataactctccagaattagatacggaacggccgattacaagtcgtagtgcatgcgaatcttcagaagaaggagaaatagacgaatatgataacgaggaagatgacgaggatagtgataacaatctatcgaatcaacaattaatggaccctggttccagtgctggcacatcacaatctgctggaaagccatatcgtactcacaaacagcagcaccatcaccgacatcgtcgatctagtggaagtattatgtcggctacatcgagccgaaaatataactcaaaacatcataaggcgagtgcatctgcttcagtcatcgtacctagtaatcaaggcacctcatctaagacatactccaactgtgatacatcaccgtcgtctggcaatcaaagtgaatgcagcagtactagtagcacaaccggtgaatcctcacaggacgtggccatggccattagagcagccggaaggattaaattcaaaactactgaaaaccttctgcatagactctttgtctgtatagcaggagtcgccgatcaattacaaaccaattttgctgccgacctacgccaaatgctaaaaagtgtgttcattataaattcatcacctccggaaccggaagagccaccagagttagcaccgacgtcaagtgataaaccaaaggaaccagacccaacggatttgtttgaatttcgtgctagcgaacaggatgtaataactcccggtcaaaacagtggagggtcgagtcaaagcatttattcagcagaggaagtaaatccagaagatccgcatgactctgtttttggatctccgggcacttctcccatacgagcttcttctgctccgcgcactatgatgactactgcagagagtggaggtgtgacagttaatgtttctgtttcggttgttaccggtggtggctctagctccagtaggaatgtccaagaacgaagtgttagtttaagtgaaacgtcgattgtggtcgaaaacaatggtggagccacagattccaatttacgtgatagccaccgaagacacagtgcaattgggtccaaaggcgagtacggacgaagtcgatctagtccgaacagtccagtgaatggaacatctgctgaagaacgccgcatgccggaggcacctccccgttggattccagatggagatgcgccacgttgcatggcgtgtgcctcttcatttacaccattcaggaggcgacatcactgtcggaattgtggtggggttttctgtggcgtatgctcgagcgcctctgcaccacttcccaaatacggattgactaaggcggtgcgggtttgtcgagattgttatgttcgtgaagtggggacctagagattagcagcgctgaaaaaactcaattctttttagttaactattgttgaatttttcacgtgacgagttcttttcttactgtgaggtatttgtttttactaaaatgtaacatgtctgttttatttgtattttacaaaacataagacgaagtaaaattatcaaatcatgtttttactg

SEQ ID NO: 698 - DNA, 3783 bp, Aedes aegypti
tcagttaaatcgaaatcagagggagatatattttactggaagtaggggcattttttattgggattttccattgatgaagaggcggaatagcagttacctgcggcggcataagccggggtgttttcattgattacccataggaaaaaaattcgaaacagatgagctggagttagctgcgacaacatgggcgtaagatttcagagtgcatttggaaatcacttgaaccggtccaaccaaaatcatttaccctactcccactgtaaataaaacacacactgcaccggtgcaaagcaaactgtcaaaaccatttttcggattcgcttttctcggatgtttctgtttttcatgttttcctctttgctccctgtttccattcatatcatcttcttgcaaacaagacgcatcagtcagacggggcacggttttgtggatggtttcgtaactcgcgacacggtccgtcatcgaagaaaagtgtagcgaaaaaaagtacagcagccaaaggaggaaaaaaacgcagaacggattcgtcgactcgtctcggcgggggagtgcgtttgtgttcttgccggaagataccgaaaacgaggtctattccggcgttttcaagagggtttttgtaagcaggaaaaagttggaattgcggcgttctgcaagaaggtgtttggccccctctgaaattgatcggatcggggaaacaaaagttcacaagtgcaaaagacgaagaaaagaagcgaaattttatgttgattttatgctgctggattgctttggaacgccgttgttgacccccaccgaacagaagccaaagaagagtcgtgggagcctggcggcagtttattgtcttttgatccacttcggggagctttccccgggagttcggtgtgaatatcaaacaaactgctgagaggagggtgaaggtgaagtaatttcaacaatcgattgttgccgcttccgctagatgtgagtgaggtgattggattttgggggatagataggaaaaactgcacacgataatatggtggcatggtcggcttcccatcgacgacacgttcgcattctgctcgtgggggaccagggcgttgggaagacgtcactgatcctgtcgctcgtcagcgaagagttcccggaagatgtgcccacaaaagcggaggagattaccatcccggcggatgtcaccccggaacaggtcccgaccaacatagtcgattattcagctaccgagcaaacggatgaggcgctggcagaggaaattcagaaggcgcatgtggtctgtatagtctattcggtggaatgcgacgaatcgttggacagaatcaccacgcattggctgccggtgatacgggaatattccggcgaacagcgcaaaccggtggtccttgttggcaacaaaattgatctcatcgattactcaactatagaccatgtactgtcgattatggaagacttccccgaggtggagagctgcgtggaatgttcggcgaagacactgcacaatatctcggaaatgttttactacgcacagaaagcggttctccatccaactgctccgctgtatatcatggaggagcaagatctaactgacgcctgcaagaaagctttgattcgaatattcaaagtctgcgacattgacggagacggtttgctgaacgactacgaactgaatcactttcaacgtcgctgcttcaatgctcctctacagccacaggtcctggacgaggtgaaggccgttcttatgaaaaacaccccggatggtatccgtaatgattcggtgacgctaaagggcttcctcttcctgcactgcctcttcatccaacggggacgcaacgagacaacgtgggccgtgttgcgtcggttcggatataatgaaaatttagaaatgagttcggaataccttcaccctgcagtgaaaatcccgccaggcagcagtaccgaactgtcccaccgtggccagcagtttctgatctcgcttttcgagcgaagcgatcgagatggcgataatgctctgtccccggaggagtttcgcgttgtgttcagcgcctgcccttgtccacctttctccaccgatatcaagcgtacggttccgaccaacgaaaacggttggccaacgctacacggttggatgtgccggtggacactgatgaccctggtcgatttgaacaaaacgctagaatacttggcatacctgggcttcagcgtgcacgagaacgagtcccaactggctgccatacacatcactcgggaacggagaatagatttggccaagaaacagaacagccgatccgtgtacatgtgtcacgtcatcggacctaaagggtcaggcaagactgctttctgtcgggctttcctagccgaagatatgcggaaactttcagacaaagacatacgcggtacgaaccagtatgccatcaacacggttcaggtgtacggccaggaaaagtatctggtcctgcgggacattgatgtgcgccaggtgctggacccgttgcaaccgagcgaagtgaactgcgacgtggcctgcctggtgtacgacatcaataacccaaagtcgttcgaatacgtcgcccggatatacatcaaatactttgccgagagtaagattcctgttctgatagtcggcgctaaagcggacatggaggaaatgcggcaagagtatctgctgcagtcgccggacttttgccacaagtacaaactactgccgccgcagtacttcagcatcaagcacaacaagaaggacatctacacgaaactggcgacgatggccgcatttcctcgtttccaagccgcgtggattcttttctataagcatagattggtgcagttatgggaacaaactcacctgaaacagttcggtctaatgtccagcgatccgttgttgtggtggaaggcaggcctcggtatagcagcagcgaccatcgtgggatttttcgtcgtgaaggctttccacggttccagctcacatgcgcgatgaatcggcttaacaacttgctaaatcgtagaatcaccagccggtaagagcaatttgaaaataaacacacattttaccaaccagacgaccagcggataagcgctgtcgttgtcttaactagatttgttccgagtctactgtaaatagtcgtcactagcgatacaagttgcaaagttgtgtttagctactaaggttcagaattcagattattgcaacgtttgcattattgcattgactcgctgaagaattcctagcaatggccaaatttatatggctttcagactagactctaagcagctttttctaaagtttaacaatacagaaatatcaataccaaacatagcttgtctttattaccactttatcccgcaatattatctttagtttgtatttccatccatctcaacttcgttgatgcaatatcttatattttacgtggcgcgcgctgataccaattcttcaaaagtatgatttagattgcgcattcaaccttctgtagccagagttagggtccagttcgagttcgagagaatttgaaaatataaaaagtaatttcctctgaaacagcagaacaaaataagaatatcagtttttttttgtaatttgacaaacagaacaaactgatatctttattttcattgactcgttggcttttacggagaaaacaaggcttattagatttgaattgtgcttaaatgcggattgccctttattataatcagtttcatcggaaaaattgtcagagtctagacacacagagattgtaaattagtttgaccatacacattggtatcaatatagaaatcaatagtaagata

SEQ ID NO: 699 - DNA, 3945 bp, Aedes aegypti
gttctcaccgcgttcttagttggtggcgctaggaaaatcgttcgcgcaaatcgtattcatgatccccattgcaccagctagccggcatcaatcatcgcgggttcggtcaatacaaaaacaacataaaccttaccggcggcaatgttgacgatcgttaggcgcggggccgcggatccatcggttcccgaaccacgccagttgttgagtggctttcgtcggatgcggacgcgttttccgtgctatctagcttcttcggtgacggttatcgcgattgcgcactgagttgcacgagacgatttattatttgtgaatagaattcggtcggtggtcggaggcgatagggagaagtgtattcccagagcactgatagagcgcgtacgtttgccgtcaatctccatgagcgaaggaacgggaaccttgacatcgcggctcacatagtgacgatacggccattccgtcaccaatgttctcctgaaggtataagttacaggactggcatgattctattttcccatttgttattcagttcgaaaatctaaaacggaaagcgctccaaccaaaatgccaccaacggaagccaccattccgctaacggatggcaatcggatcgtgaagcctccggtcaccatcgtttccaaagaggccaaccggcgacagtcgctgatgcaggaagatgcaacggtaccagatgcaacgatgcccaacgagaatggaaaactttcggacgaacagcaacggcaacaacagcagcacctcagctggctgggccggctctcctaccatgtgtctatcacgatcggccagtttttctacagattgggccggttcatagctaacaacccgtggcgcacgatcattgcctgttggttgatcgtcgccttctgtagtttgggattcttgcgattccaccaggagaaaagtcccatgaagctgtgggtgccgcaaaattcaaagttcctgcacgataccaactgggtgatcgacaacttcaaagagggcaatcgtatcgagacggtcatgttgaccgcaccggatgtacttacaccggaagtattacaaaagcttgccgagatcacggaagaaattgtgagcttgactgtaatcaacagtcatggtaaaatggttggctggaatgaagtctgcttcaaagttccactgatagctgaatacacagcgaatgaacgcacaaaacgggaagactctcaatctctagcaactacaaaacgtccgaagaagcaaaagcctttcttcaaccccagcgttgatctaccgagcttcatgtactgtccactgatcaacagacttccagttggttgtctggaacgtagtatcctcgaactttggaagttcgaccgggaggtcattgcaaatctcaccaaagagcagatagtcgataaactgaacagcaccaagatcagtcccgtcacggggcacacgattgacttctccgaacttctcggcggagtgcagcgcgactggatggggcggattgtgtcggcgacggccctgtactcgaactggatgatacacgtcaactactccgaagtcgactccgatgtcagtgggaatgctgccggaacggaagattgggttacggaggaggcaatgctatgggagggcaagtttttggaaaaacttggagaaatgggtgagaactataccgatgatgagacgaagatgttctacgccgcggggcgtagctacggagatatcagtgccgattcgatgttcaaggacattgataagctggtgttcggaggagtggttatgttcatctacatgcagttggtgctatcaaagttcagctggactgaattcaggataatactaggatccgttggcctgctcagtgttgggatgggtttcatagctggcagtggcattgtttcgattctaggcgtctcgtacggtcccgtgcacacgtgtctaccgtttctgctgatgggactgggagtagacgatatgttcgttatgatggcatgctatcgtaagattcacgaaactcacgcaaatctaccgttgcccgaacggatgggtctcatgttgaagcacgctggggcatctatcacggtgacgtccctcaccgatatcgtagcattcgccgttggttcgattaccgtgctgccttcgctgcaatcgttctgcatctacgcagcattcggtgtgctgatgatgttctttttcgtcatcacgttctacgtcgctatattcacccttgacgagcgtagaattgcagcccgtagaaattcattcgttccatggaagatccatgacgagaaatcaacgcagttatggtgccagtataaccttatgcatcgcttcatcgaatttatttattcaaacattattcttacgaacattggaaaaactctcatcatttttgcagtcatctgcatgacaggtctgaacattcaaagtttaatgaaacttcgtcaaaagttcgacccgaactggttcatcccggaggaaacctactataaccaatttatagtaaaaaatcgcgaacattaccctaataatgggtacgaagcaatgctacttttcggcaactacaactacaccgcagagttaaaggaattactcacgataactcataagctggagaacagaactgatatactgcatagcgtggactcttggcttgaaccattccaggactttgtgtactctaactatgatcaagatattggtgaagtcgtgctgagtgaatcagatttccgcaaatacctatcgaagttcctatacagtcacgagggaggccgatatcaaatgaacttcaagttcgcatccaagctgcagtgtggagaaccggcgccgaacattaccgtcactacgatcgacttcaaattccgcccgttcagtgaacgagaagaatacatccccgccaagtacgcagtcgaagttctgctcgccgagagcaactttacaacgggagaaccgttcaacacgctctgggcgaagatcttcggtaactgggtcaccgacgaaatcatcgatacggagatctacagaaacatcgccttggccatggtcggtgtaatgttctgctcggctgtgctgatcgtcaatccacagatttgtttctggattttcatatgtgtcctgctgacgctggttaacgtaggcggattcatgcaacggtggggtctgaccctggacatatgctcttgcattgcacttcagctagctgttggtctctgcgtagattacgcagctcatatcggtcacacgttcctaactattagtcatggcaatcgtaatcgtcgctcgctggaaacggttcttcacataggcgccgccgtactttacgggggaggatcaaccattctatcgctcagcgtctctctggatctcaggcgtatacctaccgcaccttcttcaagatattccttctagttattttgcttggcttgttccacggacttgtcctactaccagtcatccttagcctcgtgggacctcccccctacagtggctttatagacgactcgaacaagcttcccgatgatatcgaaaaagaaatgcaacccattactatcaaccagaagcggcacaacggccaacttgctcactgtgaagaagagaagcaaccgatgaggacagaacccgtactttgaacgaaacaagcactggaagcgttccatgacttatcttgctaatcccccggaaagcaacgagtggattgcaactgttaacaatcaatttgaaacaaacatacacaattagatgcacaaaaagtaagtctttttctgctgttttacactcaagcaaccatatttgaatgatcttgcaacaagagctgtttttttatataggccacgtgatgccattgtgattttaagtttgctaatgttagctacaaagtatttttggacaaagtcattacatgtgtaagtgaaaaaaaggaaggcggatagatgaaaaaagcaattggattgtactaaa

SEQ ID NO: 700 - DNA, 1855 bp, Aedes aegypti
tttcgaacgtcaacggggaaacagctcttctcctttctccaaaacgcgtggcttgtaaccgagtgaaaaattgtgctgcttcagttcaagtgccccatatcttctaatctaagtgtttcgcagacggcttcactggaagaaaggattggagatgactgcccagtacaaacaaacgaataccaatggattaacggcccggaatttgaacgtggctgttgttgggggtggactggttggctctctatttgcactccacctcggcaaaaaaggacacactgtggacctgtatgagtacagagaagacattcgcacggccgaactggtcattggtcgtagtatcaacttggcgctgtctgcccgaggccgcaaagcactggccgaggtgggcctggaggacgccctcctccagcatggcattccaatgaagggccgcatgttacacgatctgaagggaaaccgtaagattgtgccgtacgatgccaacaccaaccaatgcatctactcggtggggcgaaaacatctgaacgaggtgctgctcgacgcggccgagaagtacccgaacattcatctttatttcaacaaaaaactccaatcagctaatctggatgagggagagatgagtttcattgatccaacgacgaaggaatctactcacaccaaggccgatctgatcgtgggctgcgatggagcttacagtgctgttcgcaaagaaatcgtcaaacggccgggttatgactacagtcagacgtacatcgaacatggctatctggagctgtgtattcctccgaccaaggatggggatttcgcgatgcctcacaactatttgcacatttggccccggggaaagtttatgatgatcgccctgcccaatcaggatcgcacttggacggtgacgctgttcatgccgttcaccaacttcaacagtattaagtgcgatggcgatttgttgaagttcttccggacatacttccccgatgcgattgatctgattggtcgtgagcggttggttaaggatttcttcaagaccaggcctcaatcgttggttatgatcaagtgtaagccatataatgtgggcggcaaggcggtgatcattggtgatgcggcacatgccatggttcccttctacgggcagggaatgaatgccggattcgaggattgtactgtgttgaccgagttgttcaatcaacatggcagtgacgtcgataggatactggctgagtttagtgatacgcgttgggaggatgcacactctatctgcgatctggccatgtataattatgttgagatgagagaccttgtcacaaagcgttcctacctgttccgaaagaagttggacgaactgttatactggatgcttcccaacacctgggtcccactgtacaactcggtatcgttctcccacatgcgttacagcaaatgcatagcgaaccgtaaatggcaagacaagattctaacccgcgtcttatactgctgttccatcaccgccgttgcagcggctggttacttcggctacaaatacggaaatatggatctcgtgcaacactactcttcctctgttctgcagcttcttaaactaaaatgaaaaactcatttctgcatttacaacagtatctttacctaataattccttcatttactacaataacaatcggtgatgatgcaaactcttcaaatattctttgtattacactactgcaataacctgtatgattctagtgatgactataaataaacgtgcaagtggagcatatctgtgtcgaacctctttggactttgaattataactaagtaacaaactatcaccactcctcgctactctaaaatgagcttgacattttcataattttcaacatat

SEQ ID NO: 701 - DNA, 3395 bp, Aedes aegypti
gacagtaggtgatcagccgcgctttcggaacgttcaaacaagtagtctgaagcttcagctaacctgtagctttcccactggaaggagttcgtttgctgaaggttgttaagtgctttttataaacattgttgggattgtcgagtgtttgaaattttagcgatcgagtggcctttaagggttagtgtgataaaaacacttgcagaaaataaaattaacagtgtaacaacaatcgacgaatcgcactctcttctcccgcgcgttcggttttcagagagagaagggtgcttcaagaagaatcggtaaacaagccgtaacaaaaaagtgactgtccaaattcggtctcctgtggaagtgctcgtgtgaaaagagggaatcggcgaggaaattctgctgcagtttttaatcggaagtgaagtgaaatcgcaaaaaaaaagactcaaaatgccgcagaccaaagcaaccaatggattcgccaccaatggccacaatggctacgaaatggaagacgggtgctcctttttgttcacctcggaatcagtaggcgagggacatccagacaagatgtgcgatcagatcagtgacgccatcctggatgcacatctgcagcaggatccgaacgccaaagttgcctgtgagaccatctctaagactggaatgattttgctgtgcggagagatcacctcgaaggccgtcatagattaccagaaaatcgttcgcgaaaccgtcaagcacatcggttatgatgattcctcaaaaggattcgattacaaaacctgtaacgtgttgctcgcactggaccaacaatcacccaacattgccgccggagtgcatgtgaaccgtgctgaggaggaagtcggcgccggagatcagggtttgatgttcggttatgccaccgacgaaacggaagaatgcatgccactgaccgtggtgttggcccaccggctgaacgagcgtatcgccgaactgcgccgcagcggtgagttctggtgggctcgtccggattccaagacccaggttaccgccgagtacgtgttcgaatcgggtgcgtgcatcccccagcgggtgcacaccatcgttgtttcgctgcagcactcggacaagatcggcctggaggaacttcgcaagaacatcatggacaaggtcatcaaggatgtcatcccggccaagtactttgactcgaacaccatcgtgcacatcaatccgtgtggattgttcatcattggtggaccgcagggtgatgctggtttgaccggtcgcaagatcatcgtagacacctacggaggttggggagcccacggtggtggtgccttctccggcaaagacttcaccaaggtcgatcgctcggctgcatacgctgctcgctgggtggccaagtcgctggtgaaggccggcatctgccggcgctgtttggtgcaggttgcgtacgccatcggtctcgctgaaccgctttcgatcacagtattcgattatggaacttcaaagtatagccagaaggaactgctgaacatcgtttcgaagaactttgaccttcgcccgggaaaaattgtcaaggatctaaaactgaggacaccattctaccagcgtactagcacatacggccacttcggacgcgaaggcttcccatgggaggagcccaaggagctggtgatgaattgattggcagctggagccgttgcttgtggtggtcggagcgattcgttagccgccactaccgcaagcagtagcgacgaggctacaccagtagttttaaagaaagccaagctagacgtttaagagtatattcgagcatgaatagggtttattttttaatctgaattttcatcagttttttacgcgtgtaggtgtcgtttaataagttcccgtgacagttgggcttagattagttcagcagccctttcctgagtcaatagccggattgtgtcatatttatgagcggaaaatagtttgtattttcaaagtttatgtttgtctgtgttgacaatgtgattcctgtaccaatttttcgtacataacggaaagtatccttccaatttacactttaataatactacttcaaggtgaaacaaattgccagtcttaaacattcgaatcgtgtaggaaagcaaaaagtttaggaaacgtgattaatagagtttaaaaattgtaaacgaatttcttcgctcttgccgcctttgttagttggttagccccagtcttactttacacaaaagaaaaaccatcgcaaaaaatatgtaaccatcgcaacaatgtctctacaattagtttgtacgcttacttacacgcatacactctttgaacatttggtaaaacaacaaaaagtggtatgtaatacaaaaaataaaagtgacatagtgtttacagaaaactacacaacaagtacacaaaaaatatcataaaaagtaaaaaaaagtagaaacatgctgcttgaagcggttagatataaaacggatccgtgatgcttcgacaaagctagaccattcggttggccacagtaggaaccccatcaagtgcgcttccagagcaacatcccttggaagtgctgcctgctgcaaaattcgttgtatgacgtgaaaaaaatcagttcaactgtttcatagcgacgtatatttttgacgaatggaattctagggacatgaggtaaacatggagaaggtacgcaatagattctacattgccatgttgcaaacgtgaatcgaggaaatcggcatgaaactaaaatatacagaatatcaaacagttgcaatttatttttttcacatgttcatacacgttttgtgttgtgtttacgtaaaggaatttatttgtggaaaagagccatttcgaaaacactccggtccgctgaatggttgaagggtgctcgcagtgcagcaaaaaaatcagaaaaattacataaaatagtcccttacttaaggatgtaactgcctcagatgttagtttgctttgagttttgttaaaatttcaccagtaggaagaactagaacgtaattgaattattctcctaaaagcgtttcatttgaacggaagttttgccaaaacgaaaaaatctaacgttagaatgcatgttacgtaaagtacatttaacaaaaagaaatatataacccaaaccagaaaaccaaaaaaacgaaaaaaattgtactgcgacacgctttgcgagggctcggattcgaccaaaaatagagtttgaatagttttttatttgtctttaaatgaatattccctaaggtacgatttacttacttactgctgagaagaatggaaagcgaagaaatctaaaacaaatacttcaatatcaatcagaaccagattgagtttaaggaacaaaagcacgatcagaaaatttaataaaaagcagaaaatatggaaataaagtccctctacttctggtagagtgaaac

SEQ ID NO: 702 - DNA, 2972 bp, Aedes aegypti
atgaccgtcacctacaccgccgaagttgccacatgtcgaggcttcggctgctttctgaagctgctggtcagatggcgtggcagtatttataagctggtttggctggacctaacctgttttctactgttgtattatattctcaacataacttatcgactagttctagatgagtaccagaaaaagattttcgaagacatcgctcaatattgtgccacctatagtaatctaattccactatcgttcgtgcttggtttctacgtcaccatcgtaatgactcgatggtggaaccagtacaccagtataccctggccggacccgatagcagtattcgtcagtgccaatattcacggacaggatgaacgaggtcgcgtgatgcgtcggacgatcatgcgatatgtgtgcttgtgcttcaccatggtgttaacgaacatttcgccccgagtgaagaagcggtttcccacgattgatcacctggtcgaggccggtttgctcaacgagaacgaacataagatcatgcacgatctgaaccaaaagtttcctcgacactccaaacactggctgccgatcgtatgggccgctagtattgtgaccagggcgcggaaggaaggtcgttgccgagatgatttcgccgtcaagacgatcatcgacgagctgaacaaattccggggacagtgcggcttgctgatctcctacgacaccatcagtgttcctttggtgtatactcaagtggtgacgctggccgtttactcctactttctgttttcggttatgggacagcaatgggtgtcgtcgaaggaaaacgtcacaggggttgtgaccagaatcgaccaatacttccccatattcacaacgctgcagtttttcttctacatgggatggcttaaagtggccgaatcgctgatcaatccattcggtgaggatgatgacgatttcgaagtgaactggatgatcgatcgaaacgttcaggtttcgtatctgattgtggacgaaatgcaccacgaacatccaacgttggtgaaggatcaatactgggaggaaggcttcccggcagagttgccccatacggtggcatcagctgagattaaggaagaaccaccggcaccatctaccgacaatattacggtcaatcggaaacaggccgaagtgatatcagtggtaccatcgtcggtgcgggtggacgaaatggccgatgacaccgcaagtggaatccacttttcagcgtacgataacaaaccattccatcggacgggtccttccacaaacagcctcggcagcgtagtgaacacgatgacccgcgtcaacacagtggcgtcggcattgaaacgcttcttcagtaaggacgaaggtcacagtgctagcagaccacagagtgctacaccggaggcccaaaccggcccattccgattcccagggtcggcaagctcgtccaatctcggacagcgacttcccgaccgaggaagtgttcgcataacggatcaagtcatcgaggaggttgatgaacaacagatgaccatcacttcggttcaaggcaaaaatgatgcccgacccatggctgctagcctgtgggaacaaggtcctccaaagcctaccgagccggtagatgttcctcaaccggcttataaacgaacccagtctgcagtggcacatggtccgtatagttccaccgccatattcccacctggtggcgtagaatctttgcttagcgcatcagcacccgtaggaggacgcttcgaaacgacttttgttcccattgacagccatagggacgaaccacacttcacggacagcaaagaatcgactaaaaccatcgacgacggtttggatggtggccccgatggggacatgagtgaagcagatgacttcgaaaggttacgtcaggcacgtgaaaaagagcgtgccgaacgccaaaaggttaaactagcaagatcggtcagcggactagcgcccatagataccgatattttgctagaaaaactgaccaaaaccgcagaacaacaacagcagcaagaagctggtccgtctggcacggatacaccagacactcaccgacattccggagtgcctgccgcacaccaacaagccgacaccaccttatgattctacgtctccgacgaagacaacgtgatcgtggtcaacgtaaaggacggtagctagtattaggagaaatttgtgaatctgtttgtcccaggttggcattggcattgaaagattcacaactttttataatttgttatttttatattttcgacaatcactataaagtgagcttttcggaccagtattttatcagtttatctgattctcgactttaccttgttaagcacaaaaaagttagatattcaaatttaccataatacaactgttgaaaaaaaatgctgttatagttttgcgttcaggctatggcttctataccaatattattcaactaaattgcatcagaaataatcagatatttcacatgaagatatccaatattacgcatataagccatagtctgaacaaagcattatgtactcaaaaaaagttctcgatgaatatacttcctatcaatacgctaatggagcatcagataaaacattaacccagtgatatttaatttaaattaggcacaacagtagttactacaaagcttgtaaagataaaacaataatcacgtggctttaggagaggaacattctaattcgagatgcctttagaacaaacaaaaaaaatcgcctgccttgtgatagcgcgattcgacttttgtaacacttatttgctgcgcgcagtttgtcgatattagcatccaatctcgtttagatatttcgaataaaaatggctaaaaacacattactatacaaacattactgcatatttgcaactataaatggatagaagtagcatccttcctagaaggttttatgcgcatttttcggcgaagtccaaatacgacaaaacttaacttgaaacaaatgattatactatcggaatac

SEQ ID NO: 703 - DNA, 1673 bp, Aedes aegypti
cccacactactctgaagaagacgcgccttgtttcgatcaaagtctatattgcggcagtgcggaacctgttgagtgcggttgaaggatttaacgactgcagactctatagatttcacagtgtgtgctaaatttggatttcgcaagtgagaaagaagaacacacctcaattgatttcgattacgcgctgaagcaggtccaacgcagttccaatcgtcaattaatacaacccaaaaccagagatcgcgagtgtggaattaatctttcgctcggtcaacaaagcggcaaagggaaaatcagcttcagaaaaaaaaaactcttgtgaattgtcggaagaaatcagttacataaaacaaccagtcgtgaaagcaacgaatcgcgaccacgttcgcttcagtgcatcgtctaccttttggggcgcatttttggaagcatctttgccttacctgtgcgacctaacatacctagtgcaaaaccagtggagcctagcctcgaagaaagctgtgtcgtgtgtgataattaattaaaagtgaagccaagaaaaactggattacatcagacggttgaacgctgctgagcaccaccggttgttcatctgagacgactcccaaaactcaaaagactgacgtcaaaatgacgatgggcaatatgcgtccgctaaaaatcaccactgtcggcgatggcatggtcggcaaaacgtgcatgctaattacctacacacaaaacgagttccccgtcgaatacgtgccaacggtgttcgataaccatgcctgcaatatcacagtcgacgagaaggaatatgccctcacactttgggacacggccggccaagaagactacgaaagactacgaccgctaagttacccaaatactgattgttttcttatatgttactccatatcaagtaaaacatctttcgataacgtgctatcgaagtggtaccccgagataaggcactatgcgccccacgtaccgattgtgctcgttggaaccaaaagcgacctccgagtacacggatcggaaaagtttgtcacaactgctgagggcaagaaactgaagcacaaaatcaaagcttactcactggtagaatgttccgctaagaagaaactcaacctcggggaagtgtttgacgaagccgtgcgagcggtggagaaaaagccccacgccaaaccacgtgtctgtacgatactctagctcctccctgtggcccttttctagtgttttaggtttcgttattaactctatattattgtagttatatatcaataaggccacggccagtgatgttaggtagataatctcctttctacttaaacaatcgactcagaaatctatagtgagctccacaaaaaagtcacatttggccttaatcagaaatgaaaatccaacaagcgaaaaacaaaaaaagaaaagtattcgacgatttcctaccgttatagtattgtgcatattgaccacagaaatgttttcttcaaaacctacattagaatgagtgatcggatattttgtgctatattcttcagatgtataagtttgttacatttttgattggatattttattatatagttccaacgtatgggacccatttccatattcatcagctagtcatacgatttttgtcaatatgatcgatgaaaatgtaactaatataacttgtaaaatatttgtgtacag

SEQ ID NO: 704 - DNA, 3986 bp, Aedes aegypti
atgtttgttgtgttctgttcttccccggcgacgacgacgacgattttgacctgcagcacgacggcccccggaacagcctacccgaccacacagacgggttatgcagtagcgacagcggccgcaccggcagcagcagcgacctacggaacagccgcagcggcagcgcgtccagccggatacgagcaagcctaccaaacggccgcaactcccggaacctacgcaacaactgcaacggcaacctacgactacgggtacgctcgtacaactcaaacatacgacactagcaagacttactaccagcaagcaggggcaaccgcaggctacacagccgctccgaccgcgtacgacacttcggcagcaggaaccgccaaggtaatcaacttccaaccggccactcaagtgacgtacggcgcccaaccggctcgggctacaatccaaacggctaaggcagccactgcccagtacaccggtcaacctacggcctacgttccgcaaactaccggttactcccacacagtaaccacggtcaacaccgctccgaagccggctgccactgcccaaacagtcggtcagagcgccaactactcaggctacgaatcggccctttacagcgctgctaccatgtacgttgctcaacagcagaacaacaaagctaccaatgccgttggcggacagcagggcggtggtggatggcaaggatacaaaaaaggcccgataggaatccatcggttcaagaaccagaacaagcctcctccaaagccacagccaatccattattgcgatgtttgcaaaatcagttgcgccggtcctcaaacctacagggagcacttggaaggccagaaacacaagaaacgggaactgctgttgaaacaggctaccgaacccggcactgcgactccggcacgtcctcccaacagcctgcactgcgaactgtgcgatgtgacatgcaccggaaacgatgcctatgccgctcatgttcgcggcgccaagcatcagaaggtcgttaagttgcacaccaagctagggaagccaattccggcatgtgaccctgctccaaacacggaaaagaaggacgaaaccgatggagacgagcatgacgaatcggtcaaaccggtcggaagtgagtacatcgaagagatcaaggacgacgaaggcaaactggtcagtttcagttgcaagctgtgtgagtgcaaattcaacgatcctaacgccaaggagatgcacatgaagggccgtcgtcatcgtttgcagtacaagaagaaggttcaaccagatctgttcgtagatattaagccaaccttgaagcagaagaagatggccgaggctcgtgcccatcgtcaggctatgcaggaggagtactggaatcgtcgtcgcatggcggaagccgaaatggaggaaggtggcgatcatggcatgcgtcagtttggacgtcatccgttctttggaatgcttccgggacgtcgtccggaatcttctgacgatcgccacgttgtggcacgtcatgcagagatctaccccaaggaggaagaactgcaaactattcagcgcatcgtttcacacaccgaacgggctttgaagctggtttcggatgcgatgaccactggcggtgccaaggacgagaagaaggaggccgattccgacaagaaggacagcaaaggagatgagcagaacaagggcgatgctaatcagatgatctccttccacaaggaagccgagggcagcaatgttcgtctgctgaagggcgttatgcgcgttggattgctggctaagggacttcttctgcatggcgacaacactgttcaactcgttgtgttgtgtgctgaaaagccaacgacctccctgttgaaacgcgtcgtaaccgagctacccatccagctcaaaaaggtcaccgaagaacaaaagtacacagttacgatggctcctgtcgagggtgccgttctggtgtcggacggtacaattacggtgaaaatctccctcacatcccctctgctccgtgaagaagcaaacagtaccgctgcaaacgagcaagtcaacaaccagagctcggaagatttactgccacgggagccctgtctccaggcacttgccgccctacgacacgcgaagtggttccaggctagggcaaccggtctgcagtcctgtgtaatgatcatgagaatcatgcgagatctttgccagagaattccaatctggggaaatgtctctcaatgggctactgaattgctcattgaaaaggtcatctcatcgtccggtggaccactgtcaccgggcgagtgtatgcgtcgagtgatggaagccgtagcttcagcgatcctgatcaacggccccggtctgttggacccatgtgagaaggaaccggaagatgccctcgccaatctcagccgacagcagcgggaagatatcaccgtttcggctcagatgttcctgcgcttcatggccttccggcaaatccacaaggtgctgggaatggaaccgttgccaccgccgaagtttgtcggtaaccgcaactggcgcttcaaccgcaagcgcaggcgttccggtaccgagggagctgatagcgaagctgatggtaaaatggtgaagaaggaggaaaacaaaggggaaggtggcaccaacaacgccgtggtgaacatggacaccgaaagcgcaaagtaaaggtcgcttccgttttccttcttcgttgatatgtaaggtaggttctattcggctagaattttaactgacaactatatgaaaataagagaaaatcttctagagcaaccttttaagacagtaaacttttcaaatattggatttaactctactatgaagaatatcatcttaacatggtaataaaaaaaataatgcatacaatgtactcaaccagaacgcagttgaaatgtaacaacaaaaattcgaaataaaattgcataaaacattatctggaagatcttatcagaataacgatttgtttgtccttgaagattaaatgcaatatttgaagtgaaatcaggaggaagtcagtcagacaaactctttcctttaattcgccctcttcggcaggaattgtcatcaggtgaaccagtcagaattaccaaatcttaggcaatctatttgttgaacaaaagtcaatttatgaaagatgaaaatcctcaatgaaattttgtttcctatccttgattcctaaaatattactttgctatcaaatttaggcagaaaaccaaaagaaaagggtaagactaactaaaaagcgttttggaatacaaacaaaaaaaaaatcatatacacttaaatgtatttaatcctcaatcgaaatcagatagaaattttaacgaaaaataaagaaaaaataatgtatgacaatttcgtgtatcctttggacaaaagacctctttgagcaactaaatcagtatgatattcaaaacttatcaaccgttctccgttcaacatgaagaagtacaacggcaggttgtatcgatctagcatcctattagcgatagataggccgtcagtcagtgttccgcgaccattgacgggcagtgggacggaataattcaagtagggcccatggagtgacgttaaagcaacccaagtagcgcacatctgccaggtactttttgcgtgaattaagaagcactgataaagaaaacaatggaaacaacaatacatatgaaagttcacaaacacacacaccaacacaaaactcacacacagatacaattaacctactacactcaactctgaaacagtccctcgtttgcagagaacgtcgatagccgtagactataaataggaatccttatttgattacgaagaattacacagaatgaaccttacagttcgctgtgaatttgaaacactagatgcggaacagcattacaactttcgctcattacacacgatcgaagaacgtcagcctgttgaataggtgaagtcagtcagtttgaggaatccatgatagcaagtatgtaataaacaaatttgaagtattttcttcttgaaagaac

SEQ ID NO: 705 - DNA, 2674 bp, Aedes aegypti
catacatacatacaaattcacattgagggcaaaatttgtctttttcgagatttactgaaatttgcacaaatctcattgcctttctcatgaatcaatgtatacaaaatggttatatgtattgatattatctatttttttgagctcttgtgtttcaaatttctgggtctcatactaacttccattttatattcagacataaaaatcaagttatgttttgaaacacaagagttcgaaaaaaatgcacagttccaatacatatagccattttgtatgctttgatatacagtactgattggattttgtcaggctttttttgcggagaactttttgctctcaccgttttgtgttcgttttttaacaaatatttttcaatccagtttatagtattataaacacagggaagaaagaattcagataacttgtttagattcaaaataggagcagaaaaagatgttaaaaaggagctgacaagatcgggtcatctatgtgtgagaaacgcaatgagaatttgtttttgtgtgtcgttgctatagatctcatctctggtcctcgaggcacggattctcttcccatttcttgcctttatcacactttttttttcttatcattgctctgtttgcaatgcaatggaaagtattccaaaaaagagaaaaacttcttttttgtttacgtttcctagtgaaagagaaggtaaatgccctatcacctgcaccgcctcacagaacaagttccctaatcgtataaatgaatcatagcccggccgcagaaatcccaacgtcaatgaaccgaacgacaaaccagtttatttcttaatttgaaagattgatgaattaaatttctcctacggcaatgacatcatagaatgattgtagttcatgctaattgcaaaacgtaagcaaaaacaataattattgagaactcactttcaagcatcttcgatgagctatagtgtagaccgtatgccaattaaattatttgtttaatgacgttgttacattcttgttcgtcattgcttctatgtgtagaatagggcaaaagatgcatacacttatgaagcgcagactatctgtagtttgcacctatacattccattatcagttatagcaatcagcaatggttgagtcgagcaaacgacggagctccgatcattagttgaatggaattttttttagtttcggtttgctagttattgtaccaatatcagaatgccgtggaccgaagtttagttttcggtgatatgagtatacagatatcggcatttggagttgggaatccctttgtcctcaaacaaaaagttgcctcaggatgttttcaagtaaatgttatcctaatacatttcgacgacacatgtcgtaaagacttccatcccggcctacgtcagtgcgggcgtatctctctccggagatcgtttgttagttcaattactgcccatattcggagagggcaagtgctcgtaggtcgcgtatctccgttgttagaatattcgcaaaactgatacgcgacatctggctaggcaaatgatgtctggttccaatgataagagtgatacaatttctccgacagaagacaactatttgttcggttttccaggcttggacgaccgtttgaagcgtattgctgccaaagaactgagagaaaatgaattcactcgaaagcaatcgttgaagcagatgcgagaatggattgccaagaaccagaggatcaaaaactgccgaacggatgatccgtttctgttacgctttctacgcgtaaaaaagttttcggttttgaaagcatgtgaaacactggaaaaatatctaatcatgcgtcaaacctatcccaagtggtgcaagaatctcgaccctctgaaggaagaccttcaggaagtgttgaactactgtgccctggttcccgttggtcgtgacagtgaaggtcgcattgtggtcatgggagttgttcggaactttgatgctcagaagcaaaactctgatcagatgattcgtctcaacatgattgtaaccgagtcactcttagatgaggaagcaaatcagattgccggctttacgcacgtgttcgataataccgacatgactctggcccatgtcacctgttggtcgttggaaaatattacaggctatctacgtagcgttgtcaatgctgttccgatccgattgaagcagaaccatttcgtcaacgttcccagctttgctgcccagctgagtaaatattgtctgtcgtttgccagcgagaaactcaagtcacgaattcattgccatcgcagcgtggaggagctgaagcggaacattgatgcgaaactgctgccccgggaatacggagggaatgtaccgctggcagaattgaacgaacgtttcaggaagtatttgatggagaagcgggaaatgctactggcactggataagatggagatccagctgaccgatcaggtggagacggttcacggcggcgtggatattgtggatgctggcgcaatcggcagttttaggaaactgcaaatcgattgagccattcacggaagaaattaaagcctgtccacgttaaatttcggacacccaaataatggcagcaaaaaaaagtttctcataattcaacaaaaacaattgtttatttcagaataaaagagttatatctacaaaataaacagttgacaaggatgttaatccttctttctgtaaaa

SEQ ID NO: 706 - DNA, 1390 bp, Aedes aegypti
gttttctgtgtcgaaaactgctgctcatttgtagagctccacaagaacagaagaatccccatttccttgtagctctgaaggcgaaagcgaaaggcaaaccataatacaacatggcggaccgaagatctggcggatctagccgtaacaatttcaacgaggagaaaagtcctgctgacattccgcccatgtcgcggctgttcatcatctgtagtaaaaccgtcacagaggacatcctgagggagcactttgaaaagttcggtgaaattgaggaaatctggatcgtcaaggacagacaatccggcgatgcgaaaggggtggcctatattaagttttccaaaacatcggaagctgccagagctctggaggaaatgaatggcaaaactatcggtgataattctcggccaattaaggttttagttgcggccaatcgacagcaaggctcccgtaagcaaactgataacgaagaagaaaaatacctacgactattcgtcctcatcccgaaggaaatgacggaggagtcgctgcgcgaagaattcggccagtacggtaccatcgacaacatcacaatcattcgggacaaggtaacgaaggagggcaaaggttttgcgtacgtcaagttcagtcgcttcacgcatgcagcgcgagcttttgaggaatgtgatgccaagtataaggcggtatttgccgaacccaaaccatcgcggaatgcttccgtgtcgtccagtgacaattttggaggatttggtagtggaagcggagcgccgaatggcttcatggacgaacgcagaggtggctccggaatgggaagttctggtccgatgatgggatttggagcgatgggtgcttcgggaagtgaccgtcgaggacccggcatgaacaacgatcggggagcaaatttcggattcaccagcagcggttattccggtcagagtgcgaatcccagtgatacatcgcttacagtactgtgcagcccttcgctgaaccaggatcagctgtggagactatttgatattatcccaggattggactactgtcagataaataacgattttaacaaccgtaacgtgactgccacggtggtctacaacaatgctcagtctgcgatgtacgcccgcgataagattcatggtttggaatatccacccggtgaacgcctcatcattcgcctgggccatgaaacagctaacatgatggccaacgcagatcccttcaacggcggaggtaagctatacattaaccatttttggttgaacctcactgtaaaaaagctgtaactttgtagagaaaagagatagaaatctgaaatttccgaactttaacatttgaaaataaagctttcaatgacctctatgagtggcaataattaataatgcattatgcattaagggtt

SEQ ID NO: 707 - DNA, 2280 bp, Aedes aegypti
atgctatgctattcacttctaatactaattgataccaccatcttctctacttccagcaattcagctcaaccagcgccgtctgtaaatagccacgacacaccgcagagcacgcgaagttcggcgaatcccaacaacaaccgtctgcgaagactacgttctgcaagtactcagtcgagttcggcaaccaatttgaacagcgtcaacaacaacaacgccaacccgaccactggctccggtgccaactcgaacaacagccggcatccccctaatcgccatcggacatcaggagccaccggaacaagcactgcagcaaacacgggtgggataatctcaagactggttgacagtagtagccacgcagcagcagcaggagcagcgccagcaacgacgacgacgactacgaccggaagcaacaataaccgtgggtcgccgggcccacagcgtgaatctacccccgttcggaagaaggccattctcatcagcccacagccaaatcctcccccctcaaggtcggacagtgtcgaccgagacccggaggagtcacccaggaaaagaaactccccaatgtcggagtcggaaccaccgcctcccgccgagccgccgacggataaggcggacctatccgatgtggaaccgaaacctcgaaccaaggcactcaccaacgattccgggatagacggggaaccgccgccgcacgccgacgaggagctggaggagaaccacaggagcgaatccggaccggttgtcgagaggagacggctaaattctgcgatggaaactagcaccacggacgggggaagtctgctgcgcaagcggctggactcgtgcgaatcggacagctcgctgggtcgcaccaatttgcgcttcattcgcaagagtctggagaacacgctggcggtcgcgtactcgaagaacttcatcgacaacgacaccatcgagacggaatatccgcgcaactatgacgacaacatcgagattctgagtcgcgaagcggagaacctggcgatgcagttcaaaccgtccgaggagaagctggtgcactatgggcccattttcgactacgagaagttcgaagagcagcgcaaacagcagaagaaggaggacgacgaggacgaagcgatcggaatttcaccgtgtggacggttcctcaagtacgacaaggaagtcggacggggctcgttcaagacggtttactgcgaattggacacgcagaccggcgtggcggtggcgtggtgcgagttgttggacaaaaaggtgaaccgagtagagcgagctcggttccgcgaggaggcggaaatgttgaaaaagttgcagcacccgaacattgtgcggttctacaactactgggaatcgccgccgactgctggcaacaagaagaagaacatcgttctggtgacggagctgatgctgtccggtaccctgaagtcatacttgcgtcgcttcaagaagatcaacccgaaagtgctcaagtcctggtgccggcagattctcaaggggctgcactttctgcactcgcgtgccccgcccatcatccatcgtgatctgaaatgtgataatatatttataaccggtacgacagggagtgtgaagattggagatcttgggctggccacgctgaagaaccggagctttgccaaatcggtgatcggtacgccggaatttatggctccggagatgtacgaggagcactacgacgaggccgtcgatgtgtacgccttcgggatgtgcatgttggagatggccacgagcgagtatccgtacaacgagtgcaatacgccggcgcagatctacaaaaaggtaacgtccggcatcaaaccggccagtttggagaaagtggagaacccggaggtgaaggagatcatcgaacggtgtatccacgacaagaaggaaggcagaccgacttgcaaggagttgctcaactgtgagttcttctgcgaggacatcggcgttcggttagaaccaatttcgaaggaaagcttcattgcgaacccggacaacaccagaatggagttcagactgagaatcatggatcccaagaagagagtcaataagcataaggaaaatgaagctattcagttcgattttgatacgaaagttgacgatgctgatgaaattgccagtgatatgcataaaagcggaattctgatggaggatgattcgaagacggtggcaaaaatcctaaaggtgcagattcaaacattgttgaaggagaaagaagaaagagctaggcaaatccagctcgaaaggaaaccgaggcattgcaaaagcaggcaatgctag

SEQ ID NO: 708 - DNA, 2551 bp, Aedes aegypti
gacctctgacagccacaaacgtcaaatcggaagggaaagtgcgatgcacttttttcagctcagctcagtcacaatcttcattttcatcatggctttacgtttccgaagtgtgtcatagagaaaaacacgattttcgcgtaaatatcagtgaaattcggtacgcaaagtgtccgccgtcatccccgggactccattcacgatggatttcggcaagttgctgagcgtggcccagcgcaatgccaccaactcggagcagaaatcttccgagtcccgttactactcgaccaaattcgccccacccaagaaggaatccaaggacaagaaactgtcggctaacatccagaagttcctcgccaaaaaagaagaggaagaacgccagaaggccctggaggagaaacgcaaacgcgatgagttgatggccaagcgggaccccaaggcgaagaagaagatcgaaaagatgctgaaggtcatcaaatcggcaaacaaatcggtgctggacgatgccatcgatcagaacgacacggccgtcacgttgcaaggtccggaacagccggacgaagacgattatggttacacgtctaatgtggcgtcccaactctaccagcagctgatggacaagtacaagaacactccggaggagaagaagttcaaggacggctccaaacgggtcatgtccaaagaagatatggaacgcgcaaaggcacgagtgaaagatgccttgaaccgggttgaggaggaagagaatgcccctagaactaggaagcggaaagatgctggggaaggaagtacccgtgatgaggaaagtgcgagtggtagtagcaaaaagctggttggtccggataggtatgatccggaagaggaacgacggaaagaagcagaaacgaaggcgaaggaggaagctgccaagaagaaagcacgaagacctgcgggacctgctccaccggattttgccacgttgctcaaattggctgagcagaaacagatggaaccggtaaaggtagaggtcccagtagtagaaaagaaaaaagaaccggaacgtctcatgactaagaaagagaagaaagagtacgaagaacgccaagcttatctagaacagaaaaggattcgggatcgaatacgaaacgatcctcgtctttcggagaaggagcgacagatcaaactggcacaatacgatgcgatcaaagctgggaaggttccaccatctgccggggccaacaaatccggaccaactagtacaaatgtgatgacaccaaatgggcgtattccaaagctgaactcgtccgccggatcttctgagaagccatcaacggcgcctccaaagccgacatcatccagttccagctccaagccttcctcttcctcccgaccagacgaaaaacggacgttcccgcagaaaacctctgtcgaggcagcgtccgccaagagcaaactcgaagcggccctcacagcatccaggaagcctcccagcagcgcacaatcctcttccgcctccagggaaccatctagcattaaaaaaccagttccatcgtctcaacagaatggcgctgccaaaatctcatccaccgcgaaaccatcaccacaatcttcagcaaaacccacaccttcatcaacggccaatggccaaaaaaccagaccattcccgccggctgacgttccccaaaagacccgccaattcccgccaccagacgtgcagaaaacgcgccaattcccaccgccggatgtacaaaaaacacgccagttcccacctccggatgtgatgcggaaacgaccgctggatgcccgtggcaaaccatcctcgtcggccccgatgaagaaacgccgccccgtcatcgaggacagcgacagcgagtacgactcggaaatggacgatttcatcgacgatggcgacgaggagatggactactcgtcccagatcaaggccatcttcgggtacgacaaatcgcgctaccgggacgaggactttgacgaccgggagatggaatcgaccttcgcccagcagatgcgggaggagttcatcagtaagaagatcggtctgatggaagatctggaggatatgcgcatggaggaggaggagaaacggatgaaggccctcaagaagaagcaggcggccaagcggaaatgaaaatggttctagaggatcaggcaattgttgtttggaaggttttgattaattttacaccacttatgcaaatacctatttattttttaataatgatttattaatttttgttagtgctttattacgctaaataccccacgtttagcaaaatgcgttagaacactgagagggcgcttttgagattttgcgagagcttcttctgataggttgattttgttacgcaacgtactttggtttgatttgcaatagatttttttttatccaactacctaaattagcccaataaaaaaagtgcaaaacgacgatttagaaggaaaatagtgaaagaccatgttgtcgataaattgtggcccacaaatttatggaataaaagcgaatgaaaattatacaaaagtatacataacaatcttttcgtagaagtgttcaggcaaa

SEQ ID NO: 709 - DNA, 1518 bp, Aedes aegypti
cctccggtaatgcccccaccggagcgacccggtcgactaaccaaccaactgcatttcctacttaaaacggtaatgaaggccgtctggaagcaccaattttcctggccgttccagcagccggtagatgcgaaaaagctgaatcttcccgattaccacaaaattatcaaacagccgatggatttgggaaccatcaaaaagcggttagagaacaactattactggactagtaaagagtctatccaagactttaatatcatgttctcaaattgttatgtgtataataaacccggcgaagatgttgtcgttatggcacaagcgttggagaaactatttctcaccaaggtgtcccttatgcctaaggaagaagtcgaaatggaagttccggcaacgaagggtgcaaagaaaaaaccagcacctcgacaacttgctcctcccggaaccctagtcggaagcgtgccgcctgctccggctgctgttgtgccacctccagcggcccctgctgcagctgcaacagttgcggcaagagcacggcctagctctgctcttggtagtgccgttacttcaagcgttccaccaacaactgcacccgcaacggctgccccggtagtgccaactgttccaccaattgtggcaacgaaaccggttcctccgaccacttcgccctacattgtgaatagttcacagtccggaattgaaacggtcttacctccccagcaacctgctaaagtcaaaaagggtgttaaaagaaaggccgatacaacgacacctaccgcaacagcctacgatccacactatggccccaatctggacatgagcaatcccaagatcgctactcgaagggagtccggacgacaggtaattagaaaggaaattccaccattcccggcatcaacgtaccctatttcgccatatcagggctcgggcgctgctcagaatccaccgaagacaaagagaagctttcggatgcgctcgtgcaatgaaattctgaaagagttgttttccaagaagcactctggttacgcgtggccattctacaagccggtggacgcggaactgctcggtctgcatgactatcatgatattatcaagaagccaatggatctgggcacggtgaaacgaaaaatggataatagggaatacaagtcagccaacgaatttgctgctgatgttaggcttatatttaccaattgctacaaatataaccctccagatcatgacgttgtcgcaatgggtcggaaactacaagatgtgtttgagatgcgtctggcaaatataccggatgagccggtaaacaatataacgcctaatcagagcaaggagacggactcctcgtcttctagcgaatcgaacgcaagtgaagacgattcggactcggacgaggaatgtaatcagaagttaaaaatgctagaaaagcaactgttcgaaatgcaggaacgcatgcgaaagctcgcagaggaagcactgttaaaaaagaaggccaagaaaaagatgaaggaaaagaagaaacaaatggcatct

SEQ ID NO: 710 - DNA, 1449 bp, Aedes aegypti
ggtggttgctgtggatcgacgaagaagcgaacgatcgtcggaggctgggcatgggcttggtggctggtaaccgatgtccaacggctctcgctggaagtgatgaccctgaatcctatgtgcgaaatggttgaaactgcccaaggtgtcccattaacggtgacaggtgttgcacagtgtaaaatcatgaaggtattttcacgctacgcagatttgctcatctactctgacaagaatgccatactcatgtatagtgcatccccattcttagtcgtgagcggcggtactaggccctgctccacgagtaaatctgatataaatctttcaatctactctcgccttacaggaactcttacagtcgaagaagtttacaaagatcgcgaccagttcgccgcactggtccgcgaagtcgccgctcctgacgttggtcgtatgggaatcgaaatcctctcgttcactatcaaggatgtctacgacgatgtacaatatctacaatcgttgggcaaagcgcaaactgccagcgtcaaacgggacgccgacgccggagttgctgaagctaacagggatgcgggaatacgagaagctgaatgcgaaaagagtgcgatggatgttaagtattcaaccgacaccaaaatcgaagacaatgctcgaatgtacaagctgcaaaaggccaatttcgaccaagaaatcaataccgcgaaagctgaatcacaactcgcctacgaactgcaagcggccaaaattcgtcagagaattcgtaacgaggaaattcaaatcgatatcgtggaacgtcgcaagcaaatcgaaatcgaaacccaggagatcaaccggaaggactgcgaactgtccgccacggtgaaactcccggcggaagccgaaagctaccgcgtccaaatgattgccgagggaaagcgtacgcaaacggttgagaatgcaaaggccgaagccgaacgaatcaagaagcttggggctgcagaagctcacgccatcgaaatgattggtaaggcggaagcagaacggatgcggatgaaggccaatgtatacaaacagtacggagacgccgccattatgaacattgtgctggagtccttgcctaagattgcggcagaagttgcggctccattggctaagaccgaagagatcgttctgatcggtggcaacgacaatactacgaacgacgtgacacgtcttgtcggccaacttccgccagcaatcaacgccctgacaggtgtggatctctccaaggtattaggtaaaataccaggggcaaaggcataataaacacacacctgtgctaaacgaccattgtgcagctaattgatcgttctagagtatatttccgattagatcacgtttaataaaaaaaaaaaaacaatgctcgaacaaaccagcagacatcatcgcaacatactgtaaaataccgatcaaacacaaataactgctatgaataac

SEQ ID NO: 711 - DNA, 1509 bp, Aedes aegypti
atggcatccaacgagaaggacaaggacaaagaacgagaaaaggacaaagataaggacaaggacaaaaatgcaataaacagcactcctggtgttagcggaaccagtgcgggtagctctggagttgccccttccggtggaagccgtggtagccagtcgcatagcacgcaagtcgttatgaatcaggatgcgccgaatattttagtttacaagaagatggaaggcatagtggagcgtatgcaaagtgaggaaggtggtgtctcggtgcgtacaatcaaagcattcatgagcaaagtaccgtccgtattcactggctctgatttgattgcgtggattatgaagaatcttaaaattgacgatgtagcggaagcgttgcacattgcacatctacttgcgtcccacgggtacctgtttccaatcgatgatcaccagctgacggtgaagaacgatgggacattctatcgttttcagacaccttacttttggccatcgaactgttgggaaccggagaacaccgactacgctgtctatctgtgcaaacgaaccatgcagaacaagacccgcttggaactagcggactacgaagcggaaaacttggccaaactacaaaagatgttttcgcgcaaatgggagtttattttcatgcaagcggaagcccaaagcaaggtggacaagaagcgtgataagctggaacgaaaagtgctcgattcccaggagcgcgcattttgggatgtacaccgtccgatgcccggttgtgtcaacaccaccgaggtagatattaagaaagcgtaccgccgtggtgcctccacgcacggctcaggctcatccggcgcggccgtcaatagcaatccaatcgagcaactcactagacaaattaagctcttgaaactcaagttagaacgtagaaccattaagatctccaaagtagccgaatcttatatatcatatttcgaacaatataacgaatacgattactttctcacaacacctgatcagccaaatccttggataacggacaatattgaaatgtgggacacagatcgaactgccaaagacgtatctcttaaacgtgtgaaacgatggggctttagcttacgagagctattgattgatcccgtaggacgagaacaattttccaagtttttggataaagagttcagcggagagaatttgaagttttgggaatcggtccagagcatgaaagctcaaccccaatcgaaggtgaaggaagctgcccatgcaatctatttggagttccttgctcccgatgcgccctgcccagtgaacgtcgattccaaatcgatggaattggccagggaagcggtgagcagctcggcacctccgaatcgatggtgtttcgatgtggctgctgcccacgtgtaccatttgatgaagagcgactcatattcgcggtatcttcggtccgacatgtacaaagagtatctcaatgggtccaaaaagaagaacaagtccataccaaatttcaaatcgaccgttttaaaatcaggttat

SEQ ID NO: 712 - DNA, 4696 bp, Aedes aegypti
cgcactcacacatcgacgattcggacgcatccacagtcagccagagcgcagaacgaacgcagaaagcagaaggaagaaaagatttttcaaaaagtttgttttcgacattcctccgcacaggcaaaagagaagctctggttttttaatccgtcgtgcgtgcgtgcgctaaagccagatcccaatccgcgagtgtttgtgaatcgagaggagtgaccgggtccgtacaatgcaacccgaatccagggaacatcttccagtctttctgtagaagcagctgcctttcgtttggtgtggtgtcttatattaacaaactacatttaccactgcatacaggcaaaagttcaagcaactaaaaacgtcgtcacacctattctctttgaatgcatttttatgtttcgttttgtgtcctgttaaaagtgaagttttacataaagttttcagtaagacggagttcaaaagctcaagaagtgtcctatcattatatggaaaagtgaagaaagtggatccgcctccagagaaagaatttgctttagtttcctatgcggtcacaatttaatggtgataaagaaaagcataaaatttatttattaatatgttcgtaaaataattggaatacgcgagtttcataggaaaatgtgacatatacccaaatcaaccaacaaggataacgaagattctaaagtgataactgtgaagatcgtgtagcgttaagtgttaaacagaagctaaaaaaaactaagttaatccaacttgaagcaaagtaacagcagcgtagcagtaataataaaataaaccatctgaaagagttgaagtgtaaatgcatgatatgtggtgaagcctttgcatacgaaatatgactcagtgcgttaagttgagaagaagcatttggtgcaaagccagagtgaacgacgcgagtgagaaaatcgaataacaacaaccaacacaaattacgtcaacgaagccaaaagatgcgtgtgatcaatttaaccgtctaacgattaagaaaaagtaaacaacgctctttccgtgggtcctgatccgggaagaagagaaccgaacaaaatccaaacgaaaaaatcggttgctgcaagcaccggtgacttcagcaagcacatacctatctattacttaagccggttgggcggtgtgtgacgaaagggaacgcatcatcagcagaagcaacaatgccacgcaacggtgaagcttccggcttggataagggtttcagcagcaaaccgacaccggactggctacatccggatcacgttataatgaacgaaggtgtcacgttcgatgtgcggtacataggatgtttagagatcaaagcttcaatgaaaacactagatttcaccacgcgatcccaagtagcgaaagagtgcataaaccgggtatgtgaagcggctagtttaaaatcctcaaagaagcggcgtgtcgacaaacgggtattgcagtgcatagcggacacaccgaacatgcaaaactccggtaccaacgtaacattgactgtgtctagtaaatacctctcgctagttagtgtagatacggcgatccactgtctagtcgcccagcacgatatgccccgaatatctttcgcctccggcggtgatacggacacgctggactttgtagcatacgtagcgaaggacacgtcggagtggcgggcgtgttacgtactggagtgtggaggtggagttgcgcaggacctgatagccacaatcggtcaagctttcgaactgcggtacaaagagttcttcaacaaaccggaaacgcagaacaaatttcgggagtttgtaaaaaccgacaaagagtactataacgatctaccggacaagatgcctcctgatttactgacagaaaacgaccattcctcgcagtcgcacagttcttccagtgtcagaacgcgagaaaggatatcgagtaacttaatagatctgaatacaccccttccaaatcacgattacgtgaacgacaaacattctaataccaattcgcacagcaataagtcggtatcttccagttcgattgtgaaagatgtttttgatatgcaaccgtttacaatctcatcagaaatccagaaatctcaactactgactgaatcgtggtaccacggcaacatcagtcgggcgcaaagcgagcatctcctgaagaacgatggggactttttggtgcgggaatcggccggcacgcccggtcaatatgttctgacgggaatgcagaacaatctacctaagcatctgttgctcatcgatccggaagggatagtacgaaccaaagatcgaatcttcgaaagcataagccatctgatcaactaccactggacgaactcgctgccgattatttccgccgaaagtgccctcctcttgaggcatccgattctgcgaacgacggaccttctgtcgaaggcgaaacaacaacagcaagctcaacagcagcaacatttggagctcaactgagggtgcgagtgccagtgctgttctcacgggggtcaatctccggagcgcagcacgctactggatcaacatcagcaacaggcctgctgcagcagcagtagtggtggcagttacaaaaaagggaaaaagtaaaccactgtaggaaaactatgtataaaacacaaactcaaagaactgtaaaatgaaaactctatagatcctatattttcttttcacttatactactatcgtatcgatcaaatgaaacaagggaataaggaaagcaacttctaaagttatttatgatctgatactggtgtagagtatgattctggcgggagagtgaaaatgtttggcatgaaacgtgaaaaaccaagagattaacaaaagattatctataaatacaaatatattcaaccgcaagcaggtgcatgaaatcagaaaaattaaaattactaggagttagtagatttcttctatgacgaacaaaaaataagcatacaactactattaccagaggtaaaaaagaacaaacaaaatataataattatatattgttatcaattccagtgctgttggttgataaaataacaaaaaaaaactacaaagaggacatatgaattccaactgggtaacagtatttattttttcgattgtcatattttactacaaccgggcagcggccgttttgaacaacgctaacgacaacacaaatcgtggttatcccggtttgtacaacgtcgtttgacataaaacaatttcgaaaaaaaaaaacgtttcaaaagctatcagttgctttgtatcaatcatatttgccatacatacgaaaataattagatttgatattttaaatgtactgaaataaattccaatcggggatcaacacagcggcttagggacaataggtcgaaagacaaaacgccgaaaagaattgaccagaacacgaaaattgtttgcttcggtgaaaactatcaaaacaaacaaacaattttctccgtttcgacgttttttctattcgacctcttgtattttgaccttcaatcctttcaaccttttgtcatagattcctatttctcgtcttattattggctttcttttgacataaggtcctatagtgttagcatagccccagtgtattagcgtttctagagctaaacttcagacttcaagctagaaataacagcttgacacatgttgtttttgatttggtttttgtatattgacttgaactgccataaatgaatcgtctatctctaaatctgtgattgtttttatttcaaataattttatgtcaaactacattgaacggaacgggcacaactatgcaaaattacataaatatatatacttacagtccaaataaacaaattacatacggacgaaaaaacgcaaaaataccttcttagattccatacagttacaaaacaataagcaaggacaacaaacaattacattcaactatccaactcgaatgaggttgcatttttttactttagcacaaactcttttcctgtgagtacgattaacaaaaagagcgcaagatttttgacgtaactaaattgtgactgtggtttcgacttgaatgcataaatgcgagaatcataacgaatgcggacatgtggcgatgaatctggtattcaaggcagtgaactagtatgactgatgtgcgcgagaaagtttatttatccgtcaaagtgctaataaaacatgtacagaaacaatagcaaatgaaggactaaacgaacaaaacaaactgtttccaattcaagattcaaccattcattattattaccaacgtattatttgataaacaaaatggatatctttgcacgttaccagatgtaatggcaaaatgcaaaacctaaatgagatgcaacatttatcaagttactatatgaaacaggaaagcaaacaaatgcttgaaataaatatttaaaacacagtttaactttacgtttgcttagagggtgttttgtttgtaccgtacagtgaatatcaatccttccgttgtagatgacagatgttatgttttaaagctagatgcatcggaatcaacagagatacgtctagtgcttttttagagaattcttgtagagttctttctgggattccttcggatttttccctagagattgctctaccaattcttccaacgatacttagaggaatttctccataattttgctacaggatatccttgagcacaccaacgctactatccgctaatcttctatataaataaaaaaggaatggtgtttgtatgtcac

SEQ ID NO: 713 - DNA, 3748 bp, Aedes aegypti
atgagttgtgaaaatgagggtgacgaacagaacgaggcctcatcgctgatcaacaactactccagcagttccacatctagtcttccacttgcgctggacagcaggtcgacctcgctcgaggcggtcggcccgacgggagcctcggctggtccaggtgctcccccgggttcagcggtccaatgttccaacacttcggccaacagttcgggtctgttcggttctcccggcggggccaatgtggccaatctgagcgcgtttggcggcggtggtccgacgatattgcccacggctcgcgaatgggtcgacagcgaggacgaaggcactgtcgagctagaagtcgactggagttccaacataccggcggacatactcgccagcctctgtgatgcggaaaagaaacgacaggaagtgataaatgaaatctaccaaaccgagcggaatcacgtgcggacgctgcggttactggagggcatcttcatgcggtccctacaggcggaaccctcgtgcaacgatctgctgcagctgttgtttccgccctcgttgcggaaactccaggagctgcacagcaccttcgagggctatctgaagcaacggcggatagagcacagcaacatcgtgcgggagacgggcgatctgctgctgttgatgttcgaaggtcaatccggcgaggacctgaaggagcacgctgcctatttttgcgcccggcagcagatcgccctggaagcgctcaaggagcggcgaaaaaaggacgacaagctgcagcagttgctgatcaaggccgaatcgcacaaggcctgccggcggttacagctgaaggacctgcttccgaccgtgctgcagcgactaaccaagtacccgctgctgttcgacaacctgtacaacttcacgatgcgcgtccagccggacaacgagcaggaggcgcaagccatccggaaggctctcgaatcctccaaacggatactggaacacgtcaacaaggcggtccggactgaggaggacaatcataagctaattaccattcaacgtaagttagaccgaagtgggttagataaggacgctcctagtgaatttaagaatatagacttaactgtacgtaaactgatccacgatggagcgttaacgatgaagaagaatccaggggtgcaattgcatggactgttgttcgaagatatgatggttttactacaaaaacaggatgacaaatacctactcaaataccactctagtcccggtctcggcggtagcgagagcaaaatcaccgagggccgcttcaatccgatcaccaaaaccagcctgatactggtgcggcaaagtgccgtcgacaagaacacgttcttcctgatcaacacgatcatgtcgcagatgctggagctgaccgcaccgagcagcaccgagtgcaaagcatggttccgacacatatcggaagcagccgacgcgtacaaattgcgtaaaggagcacacgactacagcgaggacacttccggtgtccacggtcagcagccaaaggatagcttcgaaacggtcaccgagacgcaaaagatcgaacagacctcgacgccgatcgatcggttagagcgcaaagacagcagccatcagtgtcgagccgtcagtaccagtggaggacctgtcggaagccatgcagggggacacgcaacggttcccaacagtcacgccagcgttggcggaggtggccttaacaacaatgaagattccctgcccaacaaaaaccatcaccgggcggcggcagtggacgagaacgatgacaacgtcgagaatgaggagaaggagttgatcaaacggcaaagtctgctggcggctcaagatgtgcccagcgatgacgaccggcccaaggacgaagcagacgaacagggtggtcaacagcagcggggtcgagggggagtcgtgaataacacgcgaaccctgacgcagcagtgttcgttggttgcccccggggagatccacgtcagtgtcagcaaaaaacttcgccgccttgacttggccatccggaagacgctggtcgagaagcagcgggtcgtatgtgatatgttcaaagtgccggatgagcacttcctggcgatcgcggacatcgccggtcagccggaagcgccccaaaaggaaccgaccgacatcattctggccgccttttcccacatccaatcgttgacggacgttctcaacgagcacatgcgggtcactcagagccaggagatctcggccgtctccacgtctgtctgtgatgagtgcaattgcaatgcgaatgggggtgttgccgttggaagcaatggtatgccgccgagttccggtgtcgggaccagtgccgggcaaccggaactcaatggcctctcggcgaccgatcccgccaatagcagtagtagtagtattagtagtagcggaaattctcagataaccactgtgggcgttccaccgattggggccattctgcagcagcagggcgatcaggtcagcataaccgaggacgaggacggctactgcgagattgatgaagttcgagctgcagccgtgctgttggaatctcaacgggaagctgaaaaactcaaaaaggcggaagcggaagctaaagcagctgcagcagcagctgcgactgcggattcctctgcaaccctggacgatagcggagggggacccaagtcgccggattcgcatatcgaaatcaatgataattatgatagtactcagaatcacctgcagcctaaattcatcggagtggatctgtgcgggaggaatcggctactgcatgcatcgtctctggtgccaaccgtaccgtgccatttaatagcgagctacgtgtctggtctgaacgcgcagatttcacagctattgccaaaaattagtgaacgagacttggaacgagaacaactgagacgggagaatcagcagttacgggaactactgaatgcaatgcatcaggagcgagttttagaaacacaggaaactacggaagcacccgtactgactgacccggaaccatcggcaccggaacaaccaccgcaacagcaggagccatcccttccacaaccgtcaccagccccacctccgccctcgtctgaagccgttatcgccgtcagcaatgtaaatgagtgaattttccgaaccctttcccccaaatcccgacatcaagaacgacatcatatcccttgcgcctgaacgtatgcaattgcgggcgcgaagcgctcgcagtgacccattccagatcagaaattttggcgagcaagcatcaaaaacaattgagcggtgatgctttcaacaagttatggacaaatgccttaacaacaatcacaattggcgttggtcgtagtaatcgtcatcttcgctgtagccgttgccatggcagcgtacgtaaacgtgtgttttcccaggttgcttgtagtggatttacggaaacgcacgcacgtaacacggtaaaaagatatcatgcaaaaaataatcaaaagatcacaagcaattttaccttctagtaggcaaaagaagagagcgaggcccagatcattggggattatgagaaaaattgattagaaaagtcggagaacgatgtaggatttagataggaaccgagtcgaatgagtacacgccggattaagtttaacttattacacaaagtcctccccaaaatgtatttttttagatcatcaatgttgtttatttgttctattttatttagctttttgtttataggcgattaaaatgataattaataaaaaaaaaaacggaacatgcgagataacaacat

SEQ ID NO: 714 - DNA, 198 bp, Aedes aegypti
atgtttgtgtcggaagaaaattcccaaattggccaccggattggcaccgtgcgcgacccgaattggttggtaatgaaagttcgaacggtggtgcgtccgttgccgtattgcgttagccgcgttcgaatggccaagggccggaaaaactgccaggattcgaaggttcccttgggccagacgaattttgctcgatgctag

SEQ ID NO: 715 - DNA, 4521 bp, Aedes aegypti
aaaatgacgccgcaaccgctagaacagggaggagccgtagccagcttcatcccgaccgggcaggaaatggcccagcgacagaatttgattccgctcgggcggctgatcgatttcattatccagaggacgtatcacgagctaacggtactggcggaattattaccccgtaaaaccgacatggagcggaagattgaaatctacaacttttccgccagtacccggcagctcttcatccggctcttggctttggtcaaatgggccaactccgcatccaaggtggacaaatcggccaaaatcatggcctttctggacaagcagtcgctgctgttcatggacacggccgacatgctgtcccggatggcccgcgaaacgttggtcaatgcccggctgccgaactttcacattccggcggcggtggagattcttaccaccggaacttactcccggttgccgtcgatcatccgggaaaggatcgtcccgccggatccgatcactacgctggagaagcgtcagaccttgcagcggctcaatcaggtcatccagcaccggttggtcacggggaatctgttgcctcagctgaggaagtttaagatcgagaacggacgggtgaccttcaaggtggatcatgaattcgaagtgtcgctaacggttatgggcgacggtccgaacatcccctggcgcttgctggacatcgacattctggtggaggacaaggaaaccggggacggaaaagccttggtccacaccctgcaggttaactacattcaccagttgattcaaggccggatcgtggacagcccggatgcattggccgaagtctacaattgcctgcattacttctgccaatcgctccagttggaagttctgtacacccaaacgctgcgtttgatgcgcgatcgactggatgatcacattcacgttgacgagtacattccgggaaccaagctgacggtgtcctactggcgagagttgaccaacaaagatcccaaatcggagctcggctatcgactgatgattcaaactgatcagagtgataccaccaaacagctggcgatcttgcaccttccctcgatcggtaccaaggaagtggacatcgccgatcgagccgttcgttccgagctgctctccatggagcgactgctcgttcacacggtttacgtacgatccttggcccgcctgggcgacctcaaaaccgaactgcaactcttcctcaaggatgtcgactacagcatccagggaacgccggcgatgctgctggttccggtcctgaacccctgcctacgagccgaacacatctatatcaccgtagatacccacaccggaatgctccggtgtcacgttccgaagcacctggactgcccgataatgccggagttgcagcacgcgctgaacaacgaccgcagtaagctgcagcacctgttctcggagttgcgctactggataacgcagcggcggtgcgagaagacgctgcagcatttgccggcgaccacgcaggagcggttgccgttggtcttcccggcggatcatccgatcgagaaaattggcccccatcgggtgtacattcagatgtgccggcatgcgaatgttatactgatcgtcgaactcaaagagaaggagtccagtcccaatgaaatgacctacacgttctacctggtgctggtgaagccatcctccatggaagacagccaatctgttacggctggcggaacttcgcaatcatcggccccttcggccgccgccacggaaagtgatggaatgccaaaaatgtacctcaaagtgttatcgttgatcgagttcgacaccttcgttgctacccatggacccggaacgtacgttgatgaacaaaccgttggatcgaaacgtaaactgcttaccggagaaggaccttcagctaagcaatccaagaccatctacccggcgtacttcatcccggagctagcgcacgttgtggccatgtgcgacgagaagctgccgttcgtggccctggccaaggacctgacgcgccgtaagattcctcacggcggcgtccaggtagaggccaatgcaacctccttggtgctgaagctgctgacgctgcctcaaccgaagcctccggtaattccggtgtcgagcagtgcagcagcagcggccgcagctcagtccggaccggatcagaaaccaccggaaccgaaggtggtcagcgttcccaagatcgacaaggacgtctggaatgcgctgctgaaacgtctgctctcggtgtcggttcgcgcccagatcaacaagagcatccagactcggatgtggacggtggagttggttttctatggaactccattagccagtgcgcatcataaagagcagggaatgcggcgtgcggtttacctgacgtacgacatgcttcccgtcgattcggttgacaagttcgttgacatgatactgaacgactggtccaagatcgtctatctgtatacattggttcatgacttccgcgagcagatcaagaacgacaagtacaacctgcacaacattgtgaccatcaagtcctacagctacacaagccttcttttggcttacggcccgaacaaggaggtgaacgtcaacatctactgggatacggaggccaaggagttcaaaatggtgtttaccggaggcaacaacgccatcaatgcacattctatgatgcgagatcagctgcaggctcacttgaaccacaactatgacctagcgcagattgtctatctgcttcacgagacctaccaaccactttcgtccattgccaaactaccgatcataccacacctggcgatcctgcaatctcccaagatccccgttctgtcgttctgcatcattccgcaatcacctaccctgttgagaatttccttccaaggagtgtactgtctcgaggtacgtctccgcggatccggactttgctcgatccgagacggcgcatacagccgcttcgatcgaagtcacgtcgttgaagagttcactccaacccaaggcctgaaaggcttcctgtccaagtacgtagacgaaacggccgtctaccgacgccgatcgcaatcagaagatgacaacccaccgtcccccatcaccatggaagacccccacggtggaccggcatccgttgggtccaccttcctcagtggcggagccatgcgtggccctcagagccctcgcgatccaggacttcgcttcgcggctcctctaacgccaccctcgggatctaacccacatactccggcctcaccgcatccccagggcatcggaggcagccagagtcatccgaactttaacatgacctccccaccggctccacatatgccacatccttcgcctagcggcggccttatgccatcgtcaccgctgaaccctcagcccagccccatggctgcacattccccgggaccaaccaacctaccgtacatgtccggccacaccgacagtccgttcagtgctcattcgccggcagcttccaactggccaggatcacctggcatgccaagaccttcgccccgaccgggacaaagcccggaccataaggcacagagtaggttcatggcggtttctacctctacagaacctccccaccacaacacatcgcgagtacttccggctcgatcgtgggccggcgccatacccaccctactgacgcacgaagctctggacacgctgtgtcgtgccacgatccacccacagaaggagatccctggaccggaactcagcccactggaacggttccttggatcggtgttcatgcgccggcagctacagcgaatcatccaccaagaagataatttgacggccatcacatccaacgagccgggcgtagtgctcttcaaggccgacaacctgcagtaccaggtgttcctgaatccgaaccacatgcagtcgctgcacatgaaggtcagccaagcgccgatggccccgaccatggacggtaagccaccgtaccagtggccaccggaagatctccaaatcctggagcagttcttcgatcaacgcgtggccgcaccaccataccgcccggccgtcgttaccagctttacccggatgctgaatctcccgtcgcaggtgatgaaggacttcatccagatcatgcgcctggatctgatccccgagctgggccagggcaacaagtggaacgtgcaattcattctccgtatgccaccgtcggcaacgccgatcgtccccgttggaaccaccaccatcctgtcccatcggcagaaaatcctcttcttcatccaaattacccgcgttccgtatctgccgaatatggagctgaaggactcggtcaccatgctgttgccgatggtttacgacatgaccgtgaaccacacccagctggcggaacgccgggaacaggtcatcccgcagcttaccagcgccgtcagcgctcatctgagacgtttcgtcgagtgcaccgtgcttcagccgggcgaatgctctctcttcccggccgtacgggatctgctcatgaacctaaccctgccgaacgaacaacccccgccagggcagatgggcaaccaggtaagttcctag

SEQ ID NO: 716 - DNA, 11792 bp, Aedes aegypti
tatcattgcatatgggcctttcgggtttaggtacgacgaacgacaaaacgtagaatcacaaaacgacacaaacacaaacacaaacgacgatttggaattcgacgtttcgtcaccaaaccgtctgttcgcattcgttctagtactgcgcactcaccgaagcgtcgctttggataagctgggataaagtgccgccgcgccgcaaaatgtgtcaaactcgcatcgcctgctcacttacagcatatgctgtcagttgtttgctggctgtctgctctcagaacaacctcggccatcgactgtagcagcagcaaaacgcgtgctgagggtgaaaaattttccatgcaaagctggaaaaaagcaagaggaaggtgaatttctattatcgtagacaaggataatgattagcggtgcacattgtgattgaatattcggtgaatcggcactcaaacggtggaaatcgattacgcggtgaacggcaaactcgtgttttggcccgcacgagttcaatattcacggctgagcaaagagaagttatcgggaagaagagtgttgaatcagtgaagcagaaggcaaagaagaaagaggaagaagaagaatcagtgtaaagcagcagcagaagtgtcgagtcgagttgaacgaaaagctcctcgctcgctgctctgctctgtgtggtgtgcaaagtgctaaaagtgtgaggaaggaaaaaattcacctttctgaacaggaggaaaattaacctgcaaacgaacggattttgtggattaaatagcaggatgtcgacgctgcacttcgtggtgcatccgctgcccggaacggaggatcaactaaatgacagaatccgtgaggtggcggacaaaatcaacaagtacggtgtccagacgctgccggcgcttcagtcgctcaaagtccctgtcaaacaaatcgtggtcggtccggcccatctcggtgtgctgctggaagatggacgtgcatttcgcgtagctttttcgatcattccggaacggttggatctgagcaaacaggatgcgaacaaggccagtggcaacgcaggtggcagtacggccagtcagtcgaacaacaactcgaagaattcacccgcctcgagacaatgccgatcccgggcccgaataatgcgcacgagcagttcggttcgcggcggcagcagttcacagggatccggatcgcgtagtaccggagtcatcatgggcggaggatcgtccggcagtcgatcgctcgtttcggtgccggctccgtttgtaccggaggaactggtgacgcaggcacaggtcgtgctgcaaggcaaaagccgaaatttgatcatcagagaactgcaacggacgaatcttgacgtgaacctggcggtgaacaatttactctcgcgtgatgacgaaggtggtgacgacacggaagagggcagtgataactacgtggcagaggatttgatctccctgctcgacggtgggttccacgccgacaacagtgtgatcatagatgcggaagcgatgttctcggaggatatgttcgggttctcgaacattagaaatcgtgcccgtagtgaacgaaatcagaacagctcgtcatcggctgctgctggcggtggaggaggaggaggaagcagtggcagtggcggcggaggaagtggctccggaggcggaggaggaggaagttcgggcaatggaggatctggagcggccggtggaagtggaagcggagttgatgtaggttccggccgcccaagtagtggtagttcggctggagtcggtggttccagcggaaatggagtcaatgtcgctggtagcagtgtgggcggatcagtcggcgtaggcagcggaagtggaggatctggtggcctaagtagcgccgaacgggaaggatttggccgttggcgtgataggcagtactttggaccgcgtcgatggttccagagtggccgtgaggacggctgggacaaggaaagtgatccaaaaaagaaagaatacggatccggctatcccctgtgggtgtcagatgagctagaaccatggccagagaaggatatgcccgtacgtttcaccgagattgcatcgctgtattccgagtttatcggtgtaaccagcaagggtgaactgcatcagtggcgctgggcagacgtagaaccgtatcgaagtacagaatccatcaacattttccatcccaaaacagttcccttgaacctattatacgagaaggtaattcacatctcagcaacttccattcgttgctcggtgtccactgagagcggtcgaatcgcaacttggatggatgaattgcttggctatgctggaagtaagctagaacacgtcgccaccagctatccggagtttgcactagacaaaatcgtatccttacatacgtgcaccttatacacggtagctagaacggaaagcggcgaactgttttggtggggcgttttgccctttggacaacgaaaacgcctctgggataaatataaagccaaggcgaaaaaaccggtacggcccagtgtaaatactccggaggtgactgtcggtgcgcaagtttgcatgaagaacagtcccatgtatcagcatggtgccattggatttacgatatcaaacggcgttccaaaggttggccaattgctcaacgccgcctgggatttgaccaatatctgccgcttcaagctcatatcgatgtctacgctttcgcaacagttgggattggtaaccggaacgagctccaatgctccgttgggaaatctggcaccgtgtgcagagaaagaaaagcctcagagttcgagcggtaccagttcctccaagcagagctcaggtggcagcaacaaggagacggccgaccggttggatatgcctccacctccgtcgccggcttcgagtacttgcagtgacactggcagcgtgagcaattcccacaaacgacagaagcgaatggctccgaaggacgattcggagacgaagaaggatgaggaacagtggttgctgaaggatgttatttttgtcgaagatgttcgctcggtccccatcggaagggtgttgaaagtggatggcgactatgctgcggttaagtttccgccgttgataccacctgcaagtgccagtggtgcctccggcagtaatagcaaagataagctggatgataccatcgaagcttggcaggactgccgattgttgcgcaaagacgacctgcaagtgatcaaatcggcgaccacttcccgagtaccggactgcttccagaagattcccagaaggatcgtactaaatccacatcttcctagtggtgagaccggttcgcagctgttgacaattgcggtcgattctaaaggaattcatgccatcatgagaaccggaagcaagctacactattgcttattcaacttgaacaccggacgccaggagcaggacagtattttcccaacggatattgcatctttcctgggatcctcgccgtcgaacgtttctttgacctgtgctggcgattgttcggatagtgtgttgctgctgcgagacggaaacaataccatctatcccatgtccaaggattgcgttgatgccataagagatcctacgtggttagacctgccacctatcaaatgtattgctgctgcttcgttgacgcttccttcggttggggtaaacttgaaatcacaagtatcacttgtagtcttggcccctgaacagcaactattaatgtccagaattctgcgatgtgacttggagggagtacgtcatgtacttggtcagttggaaggcgaattgaaaagtcagctggtatcgataatttcggaacacactgatggtaatagaaacatcgtacatgcctgcatcagtatgtgctcgccaacgtcgaataaagactctgatcatgatccgttggcacagggtggatctggaagtggttccaatggaaatggtggttcaggaggtagcctatctaattcagctgccttggagtgcatcaatgtcatcaccaacaccatgatgggcaatcgcccagtaagcattcgtgaaattatgcgtcgcagtgtgaatcgcgaaatggactcttccaactccaacagtgcccctcttccaccaggaagtgatgaagcacctggtggatcccttcctgtcgtctactggccaccggaatatgatgtagcaagcggagacgaagacagtatgagtggtttgaatgcctcacaatcacataaatctatgaacgaaacatacatctcagatcccaacgagcgtcgcgcaaatgctctccagatcgtacaactactgtgtgaaagtcccgttttgcagccatacctaaagcaactactgagtgcaaaagatgcccaaggccaaaccccgttcatgctggccgtgacatgtcgtgcctatcaggccggaatcattgtattcaacgccattctgaaaatcgcaaatggcgacgctgctgtgcgggattctatgatcttcccagcgggaagtgccccggatcaatcgccgttgggaattttgtgctgcaatgacacgtgttccttcacatggactggagcggatcacatcaaccaggacatcttcgaatgccgtacctgtggacttacgggttccctatgttgctgtacggaatgtgccaaggtatgccacaaaggccatgactgcaaactgaaacgtacttctccaacggcttattgcgattgctgggagaagtgcaaatgtaaggcgttgatcgcaggcaatcaaaccaaacgctacgaactactgtgtaaaattgccacagacaccgatttagtcacacgcttcaattctcgtggcgagtccattctcctgtttctgattcaaaccgtgggacgtcaaatggtcgagcaacgccagtaccgagccacttcgcgtgtgcgtaactcatccggaagtgctcggaaaactccttccctggacaccgagagtgatatgccggagcatgatctagaaccgcctcgtttcgcccggaaggcactggatcgcctattgaatgattggcctgcggtacgatcgatgatcatgaccggcgccgaattggagaaacccatagttccaaatgccaaccagcccttctatgacgatgataaccagcaggtgtatttgcagtcgcagagtggaaccactttgctagataagttcacccacagtttgatcgtgaggtgtagcaacgatccactggaaaaattgctcgtcacgctggtaaatgaactacaaaacgagaccatcccgggacggatagaggaagcacagaaggttgcaaggcgtttcgttcgttctgtagctcgagtgttcgtcatcttcagtatcgagcgcttccacaatccagaaaagtcgaggaattccaccacgcaggccaagcatctgcaggcgtatcgtcgtgtcttcaccacgctgttcaagtttgccattgaggaattgatcgagatatccgatgcgttgataacaccggttcgcttgggtgtggtcaaaccgacggcaccgttttcactgtcgtccagctctatcgatagtactgatgatcttttctcggtggaacctttggcgcctccgacaaatcgtaccgcaaatatcgttgatattggcggtggaagttcgcgtggtgatgtgattgaaagcgagcgcagctcaaattccggttttatgtctagaatcaatctacgtctgcgcgacattgaggacaacaacgatacagatgccatggcacaggatgacggagagacatccgagcaggaagagatgtccgaaagagaacaacctcctccgaggagaagttccagtattcgggccgtttcgaattcggtgcccatcaatgccagcgaagaagagtcgcaagatcccctacggaatgaagaggctgcccaaggcgagagtgatacggagtttaatttccatgaggccgagacggaatcggattcggacgataaccagagtacacaggatgcgcagcgtagcgttcaaacaggggccactgctgggtcggatacaggtcacgcgtggatgttcgaaaacgaagatgattccggtgattcgagccaaccggacgacgaaggatccgaagatggcgaaagcgacgatcactctcacgaagacttcagcttggcagatgaacagctggagcgtagacaaacgtccggaggaaatcagcgaactaatctggctccacagtcaatgcagtgggctatccgtagccgcgaaacaacgggtccggagcgagtccggctcactaccggtggttccaatctggtgttcatcgacccgaatgcgctccgtcgaacgacggcagccagtgctgcggtatccgctgcccaacagcaggaagctccaacaatgacgaccacggctagcgctttggcacgcgcttttggaatcgtgctcagacagatttccgatctgattggaatgctaccgacaagcttcgctggggcgtcgtcagctttggacgttacgcaccaggaggcgatccagttgcagatgtacgttgagaaacgactgaaacccacctgggattggattctgaccgtgatggaagccacggaagcacaacttcgcttcggagcctcgctcaccgactcaaccgatccgacgcatccgctgcaccctcttaatacgccaagcgcatcgtcttctagcaataacaatcccacttcgtccggaggggtgatgggagtacttggcagtagaaatcgtgccacaatcaccacgctaggcgcaaccaccgcgcgaagtctcggatttagcgacagcaccagtaacgagagaagctcgcgcgatggtggctcatcatcggacgccgcatcaagccgtcgcgatttcctgacctactgtttgtcgctgatgcgtgcccacaactcggaacatcgtgacttcttgcccgtgctggatgtgacggccttgcgccatgttgcgtacgttctcgatgccatcctgttctatatgcgtgcaaccaacgattgcgacattgatcgcactaccacgggatcgaacgtttgggacgaccaggacgaaaacgaaaatgaagacaccgaagaggacatttccacctcgattgtgatggataccgattcggtggatgacgatctgatgcgaccatctcttgggcgtcgtcactcgttcttccagagatccgattcaacgctctgcctcggatgtccggcaccggatccgttcaacacacctctggcggaagctctgcctttggccgatcaaccacatctattgcaaccaaacgctcgacgagaagaattgttcggcatgccaaaacgcccaataaccctaccgctaaattctcaacaaccaggtgaatccaacgtcaatctggaggtaccaccggtcagattgagtttgtcatcgacaaatcgaagtgacagtacaagctcttctgctggtggttccacttcatcttcaggcaatgttgaaacggtcgcaatggaaatctaccaggacgaaacttcgcaagagaataaaccatctggctctggcaatacggttgagatttccattccggtcagcatctatcaggattccaagcagcacaaaacgacgatcgtagtcaacgagaaaggcgaagcaatttcacccatcaaggagattaccgttggttccgattcagaaccaaaagctggtccttcgggtgagcagtctcaatcgccgaagcctccaccaccgcccccaccgatcgcttccgggtccggttcatctggtgacaattactacaagaaaaaccgactgttctacatcaagaacaaatacaacgaagagtctgacgtagaggtcgatgaggaccatgatgaactatccgaatcggattccgaagacgcaccccagttgatggtgaagcgtcaaaagatcgacgaaggagccatgaatgacgacggcacgctggttgtaggccaacaggacgcatctgcttcgtcgattcgcccgccgataatcgtgaccagaaggaaggtgtccatcgaagcgacccaacaaggtgccagcggaagtggttccgacggatcggcagctatcattacggcccaaggaggcgcttcatccagtggatctctgaccgatcagcagggtacaattacgtcgtttatgacgtataccacgtccggaaaccaggtcactgtgtcaacgggatccgcagccagtggttcacccggaaagagcgttatcgtacgagctggaccctcttcgtcgttttcgccatccgcaagcaccagcgctgcagaggtaatccagcatgccgaagcgatggatctgcaggagatttccgctcacgtaacggttgaaacaactccaaacgtccaacagacggtgcaaccggaactaccgcctcgtggaatctatctccgttccggtaacagtcagggtccgctaaattcctcgatcctatcggacatcctgctgggacgttggcgtttgtcgttgattttgttcggaagagtgtttctggaggacgtaggcgtcgagccgggcagtgttatctacgaattgaacggatttcccgtgaaagaggctaagtttagacgttatatggagaagctgcgaaattctcaacagaaggatctcacgttgtccaaaatggagcgcaatagggcagctttgttgacgcagacattcaaagaactgaacacccattacaacaaccgaaggcttcaatcgccactggcgttctcacgggtgaaagttacgttcaaagatgaaccaggagaaggttctggcgtggcaagaagtttctacacatcgatagcggaagctctgttagcgaacgaaaagttgccaaacctggacgcggcacaaaccggttcagcgaagtacacatcggttccgttcaacaccatgatgcagcgcagtcgtggcactagcagtagcggaggaggaagtagcgcatccggtgctggaggaagtagtagtaacagcagggattcgaacgttcgacgaggactttccagcaaacaacctctatggagaccgaatcgtgaatctcgcaaaacgctcaattacgatgcgagacctttccgaccagcaagcgaacaaggacaaggttctgcgggtagtggtggagttggaggcaatagcagtccaccatttttgcacatcaacgatagtttaccggctcatcaacagcaactaggcgaacgattatatcctaaggttcaggctctttatcagaataacgctcccaagattactggaatgctgttagatctcccggcaactcaaatcctaatgctgttggcatctgaggaaagcctcagacagaaagctaacgaggcgttagaaatgatcttaagccggcaacgactagaaatagataatctcagcgtgggtggctcgtcttcttcggcgacgactggcggtagctccgttgatcaacaagctggtagcagttctggatactcaagtgctggtttgtcgaaaaagagcggtccggtgctgatcctggaagattgccaattagacgctccactgttctactcgcccggaaagcgtggattctacagcccccgacaaggatacccatcgagtgaacgactgaacgcatttagaaatgtcggcagattgattggactgtgcttactgcaaaacgagctattcccactgttcctgcaacgacacgtgctgaaacacattctcggccgccacatccgcttccacgatttggctttcttcgatccggtcgtttacgattcgctccgtcaactggtcaaggattcgcacaccaagagcggtatcagcattctgcagagcttggaactgaactttgttatcgatcttatcccggaggaaggttccggttcggtggagattgtgcccggaggccgagacattcaggtgaacgaaaccaatgtgttcgattacgttcggaagtacgccgagtatcgtatgatcaagacgcaggagaaggcattggatgctatccggtcgggtgtgttcgatgtgctaccggatacggcactggatcaactgacggctgaggatctgcggctgctgttgaatggcgtcggcgatattcacgttggtacactgatctcatacacttcgttcaatgatgaatcgaacgaaagcagcgataagttgttgaagttcaaacgatggctctggagcgtcgtggaaaagatgagcaacctggagcggcaagatttggtctacttctggaccggttcgcctgccctaccggcctccgaggatggcttccaaccgatgccatcggtaacgatcagacccgctgacgacgcccatctcccaacggcaaacacctgcatctcccgactgtacatccccctctactcgagcaaggcggtcctccggcataagctgctactggcgataaaaacgaaaaatttcggattcgtttagatggttgccatcccccgcacatcattaagagaaaggagactaacaacacccgacaacaactagcctgtaccaaattctgatttggaccagtgatataaaaagaagagatactatatagccaaccaatatcgcaaccaagcgaaaatccctaagaagtgtgcacgcacgatcaatgaaattgacgaacggagctgtatttctgtatacaacttttcattccacttcttttgtatgtaaatagatatattcggttgattggcgtttgattttcaaattataaaaatctgttttattgaaactccgctttgcagttgcgatttctcgtgtaaaataaaaaaaaaactaaaaaagcaaagatacaccctcggtgatttatatataattaacacgatactcggagacggtgagagaaaagggcgaagcagttttaccaaccttgtggaaacaagcataaaaaacagtaataatacacgcgttcacttagttgtgtctgacaccttcaatccttaccgtggagaagcagaggagaatgaaagctactcaatgatgtgtcgcgttttaatgtgattgaatcatttatatattcgatataaatgcatctttaagtaaatttatatatatttatcatatacaaggatacacaattactactagtactatactaccactattctaagagcaaagatctttatcaaaaaatcaccgctaaccgcaggcagatatcgtatagatagagttagattcagttctaatgttaaattagcaatcaaattcagcagagatcaacagcaaagagagcgtgctgatatatacacctagggaagcagagaagaaaccgaagtagctggcgtgcgtatttccaggagtgctttgccattgggccaagtgagcacagtgctccaaaaattatgccgatagcgttgaaacagctactacccgatcgtaggaccaatttatgttgttatcattctgattgatcgttctttctattaagtttacaatagagcaaaacctttttcgtttagtaatttatatcatgctattattattatcatctttatgagtcttcattaattgttaaaaaactttcggttcttttatatcttctttttttcgttttgcacgcaaatcaaccagcaaaccgagtaatcagcatcctcttctgaatagatgaaaagatgtccaaactgtaacaccacagcttgatatgctgcagtagcacactaacgacacatcatgcagtctatgtacctaccacagaagcagcaaaaatcaccggaaaatgataataataatcaaatggaacacacctcctgtctgttcacatacacacccgcgcactgtactagatggtgttttatcgaaaatgatatcaaactgttacaactcaaaaatactacaataagccaactgaactattaattcgtaatttcaaagaaatacattttaaacacatgtaaaaagttg

SEQ ID NO: 717 - DNA, 1927 bp, Aedes aegypti
atgttcgatcaattgaaaaagaaggtgtaccgtcgtcagcagaagcttgagcaggcaaagctggacgccagtaaacaggctgccagtccggacgatttggacgatcttagcccgatgccacagacgacggctcccccggtgcgaagacgcggaggcatttcggccgaaccggtcagcgaggaggatgccaccagctacgtgaagaaggtcgttccgaaggactacaaaaccatggcggccctgtcgaaggccatcgccaagaacgtgctgtttgcccacctggacgagaacgaacggtcggacattttcgatgccatgtttccgtgcaccttcctgccgggcgaatcgatcatacagcagggcgacgagggcgacaatttctatgtgatcgatatcggcgaagtagaggtattcgtcaacaatgagttggtaacgacaatcagcgagggcggcagcttcggcgagttggccttgatctatggaaccccgcgagctgccacggttcgtgccaaaaccgacgtcaaactgtggggtatcgaccgggacagctaccggcgcattctgatgggttccaccatccggaagcggaagatgtacgaagagttcctgtcgcgggtgtcgattttggagagcttagacaaatgggaacgactcaccgtggccgatgcgttagaaccagtttcattcgaagacggagaaacgattgtgaggcagggcgagcccggaaacgatttctacatcattgtggaaggatgtgccacagtcaggcaaaagcgtgatgagaacgaagaacccgccgaagtgggccgtctcggtccgagcgattactttggagagatcgccctgctgctggatcgcccacgtgccgccaccgtcatcgcccggggtccgctcaagtgcgtcaaactggaccgggcccggtttgagcgggtgctcggcctatgcgcggacattctcaaacgaaacatcacccagtacaacagcttcgtttcgctatcggtctaaatttcgggaaaaaaaaagagcagtgctgaatatgaatgaagaaatacacacacatcaccttaaacgaatggcaaaaaagaagagccaatgggaagaaatagaaactctggtcaagcgaacacaaattatttttcagaatccagaaaggttttttttgcgtttatcaatagaagtgtagtttgtagcggaaaaccatattttttttatatttacaaacgaagatagaatgcaagtcctgaaggcacgttgattgaataaaagctctgaaagctgttattcagcaaacaatgctttttgtgaataaaaaaatattaatttcaacatgaaatacgtttttattaggtgagggcaggccttgcaattctttccattacatagacacaaaactttacttaattttctgtttagattttaatgaaaaaatcgattagcacattttgacatttaattgcagattacggattagtaattctctaatattataacgatacaatttaatgttcttagtaactaattagaacacatcatcgacgagccgaagaaaacagaaaggtgcatgtgtgataagggagattttttctagctatcgtatcattcaaacatacacaccgaaatacattgacaaaaagatgaaaaatttgttctactaaataaagcatatacgaggaaacgccgccgagtcgctataccaaacaatagcaaggttattctattctcatcgtgaaacattcttagtgtaataaaatacggtctgcttgggaagaacgaaaaaaaaacttcacgccattgaaggaagaaaagtagaaggaagcaaagaaaggaaggaaaaattattaacaaatcaaagttgcagcatgtaacaagaagcagaagtacaggcaaaaccaattaaaaatgataatatccttcagctaaacgtgac

SEQ ID NO: 718 - DNA, 3627 bp, Aedes aegypti
gcggttcactttggctttcaattgattttgttctttcgcggtgtcaagtaccttttctctctcaagaaaatttcaaagaaagtgtctcagttttttcaagtgttttttcctcgtcaagaaaagtttctccaagcaagcagtttgattccacacagcagaccaaaagaatcccaaagcaaaaatggcttatcgaaacaataaccgtcgcaacaacggaggtggtggcaatttcggcaacaactacggtgctggccgaatcaatccttgggacacgggtgtgggcgggggccgtggcaataataatgacgccctcacactggccaacagtctgatcaataatttactccgcaatcaaaactccaaccaggtgccgccgtcgctcctcgatggcgtccaatcgtcccgattcgatgatatgaatggattcaacttcatacggaatgactatatttcaaggttaaaccttggatatcaaagacgaaatccaattcagtctagtaataataataataaaaataagaacagcagcaacaagcagggagcaaataagaaaggcaactcaagcaatgctggaaacaacaagcagtcgaagacgtcgccctacgccgatgtctcgaacgagtacctgtactgtcacatgtgcgacaagcacatgtacgatgcgacctctttcgagaatcacatcaccggtcgtacccatcgggtcatgaaggaaagcatcgaggagagctaccgcatgcgggcaaccttgctgcggcaggaagctcgcatcgccgaacagttgaagacaatcgagatcgaccggctgaagcgtatgggcaaggccaagaactactccaagatgcgcgagtactgcccgatgtgcgagttgttcttctacggacacatcatcgcccatcgtcggtccgagaagcatctggacctgaagaagttcttgcacccgaagtgtgacgaatgcgaactggagttccacaaccgcaccgagtacgatgaccatttgctgtctgtggttcacatgaagaattgcaaaactaaaccaagccgacttgacatcgaaaagaaagcaaaacaattggttatctccactgctaatgatgaattgctagacattcgtgaagaaacggccccgaaaaataagaagaaggacaaagatgctgcctcttcggcagcgaaaaaaaccgaacaaagcaaagcttcggcaactgcgaccgaatctacggaaaatggcgaggccgccaaggattcggaagcagctgccgagaagcccgccacggaggagggagctgcggacgccaagatggaggaagatgtcccggaggatgaagttgtcaaggatgaagagagcgaagattgcattctcgactacaagcctggtgatgaaatcgctccggaaatcgacaacaagctgccacggtacaagaagaaccgtgcgcttggtgtgagcctgatcggcaagctcgaatgccacgagtgccgtatctgcttcaagtatttcgacaacgaagccaccggggaaatccatgcccgcacgcactcccattaccgtgcattcattcgcttcctgaacgagaaggcccaggaggtgcgtatcgctcagaagcgtgccgccgtcgcactggaagaggctgaagccgccaagaagcagaagctggctgccgaggagaagaaatcggagaacggcgatgctgacaagaaggattcagagctctacgacccatcggaggctactggtgaagaatcggctgatgccagcatggccgacgacagcaagagcgaagaggctaacggcgaatctcagtcagagccaatggagacggagaacgctgaggcgaataagggcgactcgtccgccgctgcggacgacaaatccaccgcctcctctggtgatgccagcaaggccgacgaagccgccaaggaggatggtaaaccggagaaggagggtgacaaaactcccgccaagagccgacggggacgcgctggacgttccggacgctacggtggacgttactaaaacatcccagaaaaaaaagtttaaactcagattcaacaccattttcagcttttgaaaaatgatcttaaaaggaaagttttttgtgcaaatcaataaaagttttcagagagatgttctggaatcgaacgacaagttttaaatactgcaattaaagtcacacaaaaccacaagacactttcaaatattcttctactttttatctatccaacactactatttcacgataatgatcgtaaagacgcaaggcaaatacagcatgtgtattcttacaatgattttaacagtaaaaactatttgtgtttttttgtgtttagtcacattattatcttttgtcgtgtatgattctagattgggtgaagcacccgtaaggcgtactacctaatgtccgcagtagtttcaacattattttattaccaagctgtaacgcaaagtaaggaagaatgatatgcatacattaatataaacatccaaaaagaacacgttcgtaagaaaatctggaaaaataatcaccatattcagattaaacaatatttctaataaatgtgcactcgaaagcttctgtgtcgtctaggctttctattaccaagcgtgcacgcacaacataaatggctcgtgcaaaattttaatgcaaatgattcaacatgtcctcgatactccagaaagacgagtgcacattcttacgtatttattagtattttatggataattgtgttaactgccaagcagttgatctaacaactagacggcaagaaacatatttaacgaaacaagaagtataatatattctctgaaatgtaagcaaaggaaatcatgtttatcataaaacactaaattctcggtatcgttaagtaatccaactaaaacaaaaatgaaaaagaaaaatgtaattgtatttcaccaaaaaatgtagtagcattgttgtgaggagagttgaaacctctgcagtaaaaaaaataattgcttctctttgtgtagttacagcaaaaaccaaaaaacaaaaaacacataaaatattgtgcatcaaatttaatgagtttttctctgcaatgttctaacaagagagaattaatttgtatctttggataatccagttaaaaagcagaccgcttagctagaccgatttgagacactctcgatgcacttatgcgtagcttcagtcgaaacctatcctgggtgccacccgaatgttgtatgatggaaagaaaagaagccttttggtctgctgtagctgagttagctgacaccacgctgcatgccaatgttcgtagcattcgattcgttcacctaatgaaactaaatgaagaattttgtggaatgaagatgtttgagattcagagaaaaattagttagtagcagcatgcatctgtcaatgcatcccgtaacaaaaaaaacctaaatattgcgagttaaaaaaatattccagtgtaatattcataacaaacagaacaaattaaacaaatgaaaatacacgcgtcatcaccaataaaattgaaagcatccatggaaaacaaacacaagcaaaaaaaacaggtaccgatgtaattgagcattattgtaataccgagattgatcttctagtgattgactaaaataaaaccaagcaaaaatctgagttt

SEQ ID NO: 719 - DNA, 1780 bp, Aedes aegypti
atgtcgaagaataagattgcgagttccaaactcgaaagcgaccacatcgagataaagtcaaagttcgacgccgaattccggagatggtccctaaaacggtccgagcagcacaacttcgaggcgttccagtcgctgattgaacggttgcacaaactggaccgatcgcagctgctggtgtcctacatagatccgcgagataacgatctgctgccgattaacaatgacgacaactttggacgagctctgaccacggcccggccgctccttcgcgttatcatccagcggaaaggagacagcatagaagaaataaccggatacggaaccattaggccacggaatcttatcagcagcatcctcggacaaacccctgtgaaatcaaaaagtttagctatttctaatccacatgattttcgacaagtatccgcaatcattgatgttgatattgtaccggaaacttgcagacgagtccgtttacttaaacatggcagtgacaaacctcttggattctatattcgtgatggtacatcagtacgcgttactgcgaacgggctagagaagcaaccaggtatattcatttcccgcttagttcccggtggtttggcggaaagcaccggcttgctagcagtgaacgatgaagtccttgaggtgaatggtatcgaagttaatggcaaaacgctggatcaggtcactgacatgatggttgccaatagctccaaccttatcatcacggtgaaacctgctaaccaaagaacgttggcccctccgaggcgtggatctttctcacgcaacagtcaactgtccggcggttcacaccaatcacaccacacaacgggatcggaggaaaatgatcaagatgatcaggatgaaattcgagatcttactggtgcggcgacacttgaagaaaacgcattaattacgcaaaaagatggggtgcttcatttgtgagtgacttggcagtaattgataagcgagtaacttaaatttaaccagcaccacaacataccttttagaggtgccttcccacaccagcctccacagaaatgtataaaacagcacactattgtgcgtcaattgtgactcaaatatttagacgtctttttagactatgtgtaccaacttatagataactgctaacagtatttcagaattcattccgttcgtttatgttgtctgcatttagattatgaaaaacaagtttatattgtctgttaggaaaatacagtatatgcatttgggaaaatcccaggcctgaaaaaaaacttttattgttctacttgttgcttttgtccattgtgctattcgacttatttggaattttgtttgtgtttaactatcggtacactttttttctcgtaacatatattttaccacgatcttaatctgtacttaaaaaatggtcaaattctcaattgttgcgggagtaattcttatcatttcaggtgttatcttcacttatttgttactatgattataattcgttattattgaaaaaaatcaatccattcccaaaagtgctcaatgtaataacgcgcatcaaaattttgaaaacatacagacatgaagtagagactagtgcctttagagtatgactattaggaaacaaaattctcaaaagtgcacctttttataattggaagtctttattagtaatcaaaaatgcctttctatacaaaagtgattaaagaatcagaaaattaaaaaaaaatagcagatataaaaagacatcaataagatattccaagaacagtgcaagtatcaaaatataatgataagaagttat

SEQ ID NO: 720 - DNA, 1742 bp, Aedes aegypti
caccgagattgcttgataggtatctgtctcgcgttgtttcctcgttcgttcgatttcccattgctgctctcctatttatccacgtggttgctgctcgttggtttccactgggactggaaacaacagcaataacatcaccacgacgaataaacgccggtttcatcgactcaatctttcatcattaatttagttgattttattagctttgtgtgtgctgggtaattgaatcggttacgcatttctgatcgctgcgattgttcgattggatgtggatgtttattattgagtgtttctatcggtttcgagaacaggacagtaaaatgtaccattttagatgctattgttgcggatatatttgttacatgacttgatcggatggttgtgtccagtatcaaatttgagcggaatatgacgtcgagcaacgcgatgttcctggcatcgactgtgcacatctggcgatggacaccgaggaaggtgtcgaagttgtatggaacgaagtacagttttccgagaggaagaatttcaaatctcaagaagaaaaaatacaacaagtattcgaaaacctaacacagttagagcatccaaatatagtcaaatttcatcgttattggacggatacccataacgataagcctagggtaatatttataacggaatatatgtcctctgggtcccttaagcagtttctcaagcgtaccaagaaaaacgtgaagaaactaccactgcaagcatggaagcggtggtgtactcaaattttatctgcacttagttatttgcattcctgttcgccgccagtaattcacggcaacttaacctgtgatacaatatttattcaacataatggtctagttaaaattggtagtgtagctccagatgccattcatcatcatgtaaaaacatgtagagaaaatatgaaaaatatgcattttttagcaccagagtatggatcactcgcaacgacgaccgccatcgatatcttctcgtttggcatctgtgcgctggagatggcagcactggaaatccaagggaacggagattcgggtacgctagtcacggaagagcaaatcaaacgcactgtcgagagtcttgaggatgcccagcagaaagacttcatcatcaagtgcctcagtcatgaccctgccaaaaggcctaccgctagagaattactatttcacccgctgctgttcgaggtgcacccgctcaaactgctcgccgcgcactgtctggtgaatacctcatgtgagtcccctgctacagcaaactacgacgagatgctgcaaaagctgaacaaaccggacatggtatacgccgaagtgttgcagaccgagtatcacctgggctatgtgatcggcacggagaagctggaaaagttcgtagaggatgtgaaatatggcatttatccgctgactgccttttcggcacaaaaaccacccgcttcccgaccacgagcaatatcgcccgagactgcagaatcggtgaaatccgaaacgccagagccgctagatattgaaactaggagagttgtgaatatgatatgtagcgttaagccgggagaggataattgtgtattatttatgacaatactattaaggatggaggataagatgaaccgacagttaacatgtcccatctcgccggacgattctgccgtcgcgctttcgcatgaactagtacatttaggatttattcatgaaacggatcgtgaaaaactagctacaatgatagaggatacgcttaggagt

SEQ ID NO: 721 - DNA, 2153 bp, Aedes aegypti
atgaatcttcgcaagtttcagtccataaatctttgctcctgtagacgcacaattacttaactatttgaagtgcaagcggtcaacagtgaagttgtataacattctccggttcttcgattctatggtgaaagttagttcctacctaacgacctcgtgtttgtgcttttctcttgaaaaattgagggaacatccgatgcaacatgactcacaaccgtcgtgcaacatacaacatgctgctgaggagcagcgaaaaccgctccgtaccgttctgtaactgcgagtatccggccgtgacacggtcacgacatacggccaggaaaatcgaacgctgccgatgtggcgaggatacctctacgcggctcgattggacctgggatgtcgactgtggccatccggacacgaaaatcacaaacgggacggagatcgtgttccatcccgtgtacagccaagggacggccgtcatacgggggacacagcctctgcagcaagggatgcaccactattgggaaatcaaaatcctgagtcagctagctggaacggatattatgctcggaattggaacggacaaggtagatctcctggcacatcgtttcaaattcgctagttgtctgggactggacgaccaatcatggggctattcgtaccgtgggctgacccaacacaacaatcagctgaaatactacggcaagaaattcagtcagggtcgcattattggcgtttacgtcgacatgttccgtggagtcctcgagttctatttgaaccggcggtcgcaaggtcgtgcctactcaaacattcctcgcgacagcaaaggatgcatttacccgatggtctgttcaacatcggctaaatcatcaatcaaactcatcaatgcggcatcattcaaggatagtctgatattccactgcatgagagttatctctaagtatcccaaattgctagagcaagtgcaggcaatcccagggttgcgacggcacgcggatgatttgtggtttctccaattgcgggaaccgaaaaagcccgatgaatttcaacgcaacaaccttctgttagaagatgaggctttgctgtgcggaatgaagaaaaagaaattcaatgaaatagtttcgcagagtcaagcacaagctccgccagaaaatatttcggaggatcagatctatgaaaacatgattaccgaagaggatacaaagaaacaaccacttaatggcactcgaaccataagcactagtagcagcagtgaagacgaagagttggcgtggatgatctccagagagttcttctgtaaccattgagtcgaagcatttataagcaaattaataattccaaaatatgactgatttaaaacgctttgatcggcagttgtagacttaagtagttttcgaacaatataaggattaagaatctgtctgtgccatttacattgataaacgcttataatatgctacatggtttattttcgtttaagtgtaactgttacatacaatttgtgtaccaagcgcccaattttcgagatatacaaacatgtaagagtaaatatcctgcgaacaagatacagcgtgaatgtgttctctacatatcaccaaatatgtatccaaccaaactatgtatacctaagttaaaataaagatattaaataattagataaatgtttcaatatcttagctccgccgttttttttacggatttcattagcagttcttctaaacattcaggaactaccaaggattttggcttaagatacttaattcacagaagagaggatcaataaagagaaatcgatcatgtaactttcacctttattctaacaaacgcttaaaattatctcaatttttgaaaactcttgaaaaaaaaaatgaatgactattgatttaaaagttacagatagaattaattttggcaagaaatacaccaagacaaaaagttatgtaaaaaaactcgatgaataaatcaagcgtgtgctagaattaaggaatgtaacataatcaatttctcttcatcgatcctctcttctgcgaataaaagtgacaacatgcaaaactgctggcttaaaatgcttaaaatgctagattgtttcgctgactagcttaagtatgttaaaccagatgatgatgttgtcaacatggcgatggtttttgaagaaatttgtttcaaatgtt

SEQ ID NO: 722 - DNA, 2871 bp, Aedes aegypti
gatgtgactgatgtcaaaagtgaaaaattttcgagagtcggctgcaaacgaaatctggatcgaaaattgtggaatgcattgaacgccagaaacgaagtaaataccgctgtcgcgtttgtaattgccggaagtacgttgtgcagtgtggattaaccgcggaaaacgcgaactgtgcgtgcgaaagtggcgaacagattttccctttgacgaaagacgggaggattaggtggccccgatagacggaggagagaaagagagtgagtgtgactgacaatcatccgacgaatataaaaaaaaaatcttccagccacaaaaagaagtgtttttgataacggagcggagggcttctgtttgaagtaggaaagaaagcaacacagaaggaatattgttctccgacaatgtccggattcgacgataacccgttcggcgagccaatagtcgataatccgtttgcggacccttcgattcaggcagctacccgcaacagcaccaatccccaacagacactggacgattatgacccgttctcaaacgaagcgcaacagcagcgaacacagaacaactttggccaacctgccaccctgcagccctcgtcacaaaccgttccggcgtacagtccgagtgcggcgcagtacaacaataatggagcgcccggtgccagcagtccctcagcgatgacacagatttccactgctgaattgcagcggcgccaagatgagctggaaaagaaggcccaggaactggaacgtcgggaggccgaactgatgaacagtgccaacgccagtcggccgaacaattggcctccgttgccgtcgttctgtccggtgcagccgtgcttctatcacgacatcaacatcgacatcccgaccgagttccagaagatcgtccagaacctgtactacctgtggatgttctacgctctggtcatggtggtcaacatcctcggtgggttggtgttgttgattcatgacggggaattccgcacgtttggattgggcatcttctacgcggtgctcttcactccggcatcgttcttgtgttggtaccgcccggcgtacaaggcgttcaagaacgactccagcttcaacttcatgatgttcttcttcatatttttctttcaaacgttggtcaccatcatccagaccattggttttcctgggtccggtacgtgcggtgttattacggctatctcgcagtttagcgctggcggtattggaattttggtcggtatcttcatattggctatcgctttcgggtatggctcgtgcgctgctggcaacgtttttatgttgagcaagatccacgccatctaccgcagtggttccgagacgaaccgaatcacgatggacaaagctcgccaggagttccagtccggctttttcgggaatcaaatcgtgcgggatgcggcggccggtgcggcgagggctaccgtgcaatcgcagttcaaccagaacaggtactgaaattcaatcccaaatacaaaacaagcaaacaaacactacaaaaaaacatacaaactattactactattatatttacgaagcattacccactttcgagtttaccgtttatttatatttaaaatctattacatactggcgtgtagtcatgacccagaacggctgttgacctggttttctactctccttactacctttgcgatcactacttgatcccctcacaacccgattcttcccgttgattctacgttctttctatagtgttcccgtttcctctgtccgcttcaaagtatccatgccctacttacttcactttttttttctattttaaaaattatctgaacgaaagtagtttctgtttcttgttttgctccgttgtgggactcgtttcgtcccataaacgctttatcgattaagtatggtctgttccaatttgagattcgatttatcatgcttgagtttttgagtttaaatgaccactcgacgatgaatcataatcattgagaataaggaagaaaattgttagacgctagaaagcatggaaagcagggctaaataaattgtgagaacaaacattcaaaaaaaccctaaattaaacctttatcacgttaaatggataagctagtaactgctaagcataaatcaaaaaaacaaaccaacacacttcagtgatcattcaaaatgattagacttaacttttaaacttaccacacagagactaaaagaaccttcttgcgcgatatggtatgcgacatagacttcggtagcgataactgaaagtgaactgtaggagagctagatttgtttttctgatagtcatgagttgagaagttagacatgataagttaaagagaaaggcactgcttcgttgtttattgcctacttaataattattgaataaaagataatgatcaactctgaaaaagaagcacgtttttgatcgtcctttttgaattagttgttagtcaaagcgaagaaaaggatatccgtctcattcgccttcggttgatgtaagaagtgaatacaaaattagtgagagaagtacacattaactcaatttacattaaattaacaagcatataaatgtcagtgccctgttggtttttcgtttttcgtacttcacttcaggaagactgactctacttttccaattcgaggcggtttctatagaatgatttaattttatactaaaaaggggtacaaaatgggcgcacccatacttaagcttttgtaggtcggttcatgaaaagctcgattaactttgtgagaaatgagaattccagtttttgcgtttgttaaacgattcgcgtatctagatttttatatttttggcaatggcaatatttttgcgatacgaacagcacggtccatacccagatgtaacaaataacacattaccgtaaacgtacca

SEQ ID NO: 723 - DNA, 3358 bp, Aedes aegypti
gtataacttattattgcgcgtgtagatattcatgaaattttggttattactagttcagagttcatcacaatctgtaatgtggttatcgagatggcttccacgtaagaagtgcttcgacagaaaaacattatcgcagtcgtggaaaatccaggcgatcgcgaaaaagtggtaaaatcgttcatggagacggcgagctggcagcggaaacatgcgcaatccaaacttttccattcgggacgtggccaaaaaggtcaattctatcgtctggtttatccagcagacaatgtagtgtagtcttcaaggtgaggaaggcgcttaaccgaaccgataaacagaatatgatggccaaatcccatgcccatcgtgatgaacgacaagaactacattaaagtggacgccaagcagttcccggcctggaatttttcgtcgtaaagtcccgcctggatgtttcgaagaagttctgggagaggaaagtcgacaaatttgaatctgggtgaaatcaaggctcttgagaatgccataacatagcacatggcttcgaattttataccaaatcccagtccaaaacacataagcatcacgcacaccactgtaagactagcgtcgtttgagtatgttttgatcctccaagtacataacacagatgttctgacagatgattgtcaaagggaagaaagaagaagtcaaaaagagccgaaaatctcatcctctcgacgacatgctcgtcgcccttttcatttgtgtgtgactcattcattcacgagtagcacgcagtttcggacagtcgcaaaatttattccttcgactgaaataagtgcatccttctttttggaagaaaaaggaagaggaaaaaaatgtcacctacagtgtgtcgctgaatcagttcataatacagagaaaaaaaatgtaaaatcaacgcccatcgcgcgagctagccgattaatgtatctcacgagcaaaaggttggacgtgaaactgttcctatggggcctgtttctgctgcagatattcctaatatcggtcttcctggcgttcgggtccctgctggccgccagcagctcgatccagcaggatgaccaatcgcccggagctcggaaccgatcgcagccccggtcggcggcctggttcgacgtgaaattcgtcaacaatcagagctcttccgaatctccgtcgcaaaccgcggccatcgagggacggcagaaagtggtgggcggaggacatatcagacacccacgattccggccgcttcagctgaagaccatcgccaagccggacgattacaccaagtattataggcccatccactatcacgatggctaccgagagcacacccatctgtgctttatcgagggaacccatttcccgacagcgaaaccaaaaaagaaaacacctcccacggcaccgggacggcaacccgtgggacctatcaccaatgagactgacttcgaagcaggagagttagatgtagtagtagtaacagaaggaacggaagacgaggaagataatgacatggacaatgaagtcctagtggacgggcgctgtcgctgtcggccggaatggcacggtccagattgtggcctgccggaagtgctctggcgtgcgttcattgcctctcgtatcccaccgaggaatcaaacggcagcaccgcggaaggtgccgaagaatgtgttctacattatcgacgccaacttcatcagtgtggaactgctggagattcagatcatggaactgctggatgtggtgagtttgttcgtgctgtgcgatcggcagctgccggtcgccgatggagtgaagagtgagacctatacgataggaccgcatgtgatgagtactgattttttgaaggcaaacctagacaagattctcctgttggaggatccaacgtgtagcggaaggaacgttttccgaaaaatgaaaaagttcgtccgcaaaagtgatatgcatgtggaagacgtgctgctgtacagccaaacggatgagattctgaatcgaagggcagtgaactacttccggtggtacgacaactggccgcatccggtacggttccgactgaagtataccgtctttggcttcttctggcagcatccgaagagcaccttcatcggaggggccgcctgtcaattaagtactgtggacgaagctttccgatccgacccggaagccctgctaaggatcgaaaagccggtgatgctaattggtgatctgaatcattatggcggttggtactgccagcactgctaccaactgatagatatagtaaaatatttagagtttataaccttagtcaatactaatactagcgctagcatcattagagccaaccaatcgtcatcgtatcttcccgatccgaaaaagagtaccgttatgaatgtggaatacattcagaatctcattgccagcggaaagtatttcgatgacaaaaccattctcactaagctgcagcgccacgtggacaagtactatgcgccagagtatgtgcacaaaaacagctggcggttcgataacatcgtcatcaatctgtttgcccgctgggaagatagcgtcatcgatgacgagtactttagttagacgcaccacaatcatctcaacactcattcagcgcatcatcataccaacataatcaacacaacaatcgatactcttcctatcataatcagccaaagtttggaaatagccaatttagaaacttgaacaaaaattaaacagccaaaattactcaacaaaacctctcattataccgtactctcatcccaaacatctcaactgactcatagaagcgagcttgatatgaaatgcatcaaaaggcatcgcctaaaccccaatgaaaaaaaaaaaacgaatatgaaacactagatagctaccaaaaacaaaattttgcctgaaaagaaccagaatcaatactctgattttctgaattgaatataatcgggaaattatttctagtcgttcgaaaacttaaaaaagaaaatgaaatactatttaaattgaaattcctacgtaacaccatatgatagcactctgtcatggagataagagttactggatcgaagcgaaagcggatgaaggaaatgtgaatgtgaaacaaaaaaaatcgtaaatgccacaatacccaacaaacgtcgatgacacccagaagtatgtatacctgataaattgcatagttactaacaccattattgattcgattgaattataacgaactagagtaaatttggaacggactatcgttttacttaattcggaaaaaatataggtacactgtagtaacgcgcattttgtgattcatttgcttcctttgtaggtttaactttaattttaataataaacgtattttgtgtcatgttgattctttcaggaa

SEQ ID NO: 724 - DNA, 1059 bp, Aedes aegypti
atgccggagatacaagtgttgcaaccttcgtcagccgcattacagccggtcccggtgccggccgtagttaacagatcgagtagcggccctagcagtgccaccggtaacaacaacaacaacaacaatatctccgcgaagaaaccgacatcggaagtagatcaactgccgctctttgccgacgacgagaagaaatccagcaaaatccaagaactacggaaactgatcgaaaactgtgatgatttcgtacgccggagtgatgatttgtttttggtgcgattcctgcagtgctgtgactggaacgttgatgacgcttatcaacgtatgatcaaactgttcaaattgaagcacgacaacccagattggttcgtcgacaaaccactgcatcactacaaggaactccttaacaacaacataaagttcgttctggacaagcgagacaaaaaagggcgccggatattcgtcagcaagatgggcaacatggacattaacaaattttccgcaacggatctggctcacctggacgaactgtggtgcgagttcatgctgaacgacttggaaacgcagaagaatggaatctcctgtctgatcgatatgagtggctattcccttaagagtctccgatatctgacgccaaccaacattcgaatcggaacacagaaagccgatttgatgccggtgaagcacatggagttccacgtggtgaactcgtcggccttcatgaacgcagccgtcgccattctgtatccgatgttgagcaaacagatcaaggattcggtacatttccactactcgaattgggactcactgcatgcccatatggggaaggacgtacttccggcggagtacggtggcacgaatggggaaaagttcgatcacgacatgctgaacaagcaattgctggacttggagcaccattacgacgggttgattcgcttcgggtacgagctgaagccgcacgtggatccgagcaagtatgcgaaattcttccactacgtagaaaagaccaaaggtaataagcgaaggtacaaatccaagagggacgagaatgttgaaatgtga

SEQ ID NO: 725 - DNA, 1486 bp, Aedes aegypti
atgcttacactaacagtcgtgattgccaaggcattttcgcaactttccggaatggttaagcaaggtccacgtccgctcgtaatctgcggcccgtccgggtccggcaagagcaccctgctgaagaagctgttcaaggaattccccgaaacgtttggattcagcgtgtcgcacaccacccgaaagccaagacccggagaggagaacggcgtgcactatcactttgtctctgtggaagaaatgcaggccgccatcgaaaacggagagttcatcgaaactgccgtttttagtgggaacatgtatggcacgagtaaaaaagcagtggaaaatgtgcaacaacagggtaaggtgtgcgtgttggacatcgaaatcgaaggagtcaaacaggtgcgcaattccgatcggttaaacccgctgctggtgtttgtcaatcctccctcggtggcggaactcgagcgcagacttcgcggtcgtcagactgagacagaggagagcttacagaagcgtctgaatacggcgcgggttgaaattgagtatggttccactccgggcaacttcgacatcgtggtccacaataacaacttgaagcaagcgtacgccgatctgcgggacttcatcgtccgggagctggaaacccaacagaatcaagacaacttcttcatatcttccataatcacaggatataaaggctatgaagtgtaaacgcctcattagcccttccttcaaattgcccctcgagaaatgggggcggatggcacgtgcactccaaggacgtcaatccctataatttatgccaatattgcttttcgtgtaacacacattcatgtacacacccacaaaaccctttacatgccccctatttagctctttagtggacgtagaattctgagaactaagatagtgatcaaacctgcactgatgaactactgtcaaacactgcttcgaacgtgaaagcacttggagtatctgcaagggcaaagtacgaagatagttaagattacgaagcttagttgctttcgttgtaattcttaatttgaggttttgtacgccccacttgtacgctttttaatgtgctattctaccccactatcactattaatgtaacggtgaagcttttatttgtaaaccaaatgacgaaacaatacaccgaaggaaagcagttagtattacggaacctgacgccaaggacaaaattccaaccgccgtggttgtttacctgtcaatctgatatgtcatattatcattaggttttacttttccgatgaattttttgtaccactttacacaattataatactatagaatgcaaacatattcaaattgatccgatctagttttaagtgttgtaggtcgtagaaatgaatgtcgtcgtcttcgttgttctgtagcaacgagatgaaaaggatacaaatccagtctgaaagcatgattattgatatgagttaaatgaaataaatgattatatgcttctagataatgttagacaatg

SEQ ID NO: 726 - DNA, 3125 bp, Aedes aegypti
gcctaaactattttgcaagacaaatgtaggatatcagatttcatgactgattgcataattgcatgacccattacctttggacaaatttgtaacaaatttttgacagttccaaattcgacttcagtgtcaactacaggtccagctaccctcagcgacaaccggctccgaccgtatgttctacatcgctccacgacagtagtacaacaaccacagagcgcatacattttaatatcttctctacttcgcttctctcgcgctgtgtccagctttttcttgttgcctgcggcttgcctcatgattctcgggttttactacaacggcattagttttgtgcgaaaactgaacttgaagtgtgtggttgactgtgccggacgactccgattgcggtgcccaaatgctacgccgtgattgttatatgatgttagtttgacagtggaatttctccagccagaaaattagggatctagtgctcttatttttttgttttgtttcgtctgtgaatgtgatatatcttcatgaagagagaataaaacgtgaacaaaaaaaatacgcaagtgctctggtcgaaatcatcgtacaaaacgacggacgacagtcagtgcaacagtaggcgataggaaggagaagaggcagtcgctgcgacggcgacggcagtcggcagtgttttgctttttatcagcggtgcctccccaaaacaaccggaagtgagcaacgagaaaaatgtcttccaaaaacgaactgaaaaaactttccgaggaaagtttaacccgccagccggaagaggtcttcgacatcatctgcaaactaggtgagggaagctatgggtcggtctacaaggcgcttcacaaagagagcgagcaggttctcgccatcaagcaggtcccggtggacactgacctgcaggagatcatcaaggaaatctccatcatgcagcagtgcgactcgccatacgtggtcaagtattacggaagctactttaagaacaccgatctctggattgtgatggagtactgcggagcgggtagcgtgtccgacatcatgcggttgcgaaaaaagacactgtccgaagacgagattgccacgatcctgatcgacacgctgaaggggctggagtacctgcacctgaggaggaagatccatcgggacatcaaggccggtaacattctgctgaactcggagggtcacgccaagctggccgactttggggtggccggacaactgacggacacgatggccaaacgtaacactgtgatcgggacgcccttctggatggccccggaggtgatagaggagatcgggtacgactgcgtggcggacatctggtcgttgggtatcacggccttggagatggccgaggggaagcctccgtacggggacatccatccgatgcgagccatcttcatgataccgaccaaaccgccgccatcgttccgagacccggacatctggagtccggagtttatagactttgtcagtttgtgcctagtcaagaatccggaggaacgggcaaccgccacggatttgctgacgcatgagttcatcgggaacgccaaaccttgtagcatactcagccagatgatagcggaagcgaaggaaattagggaaaatcagagctatcggcacgcggcggcaatcagtcaggccaaccggcagctgcagaataacaataataataaccacaatcacgagggagattcggacgaggacgatgtcaactcgagaacgatgcgagagttcccggaagactgtggaacgctggtgccgggtcgggacgatggtgacggtacgatgatagcgcatacggactgcggtacgctcgttccggacagtgcgacgatggtggaactgcagtcgaatctaggcacaatggtgatcaactccgactcggaggaatcgacaatgaaaaggcacgacaccaatccggacaaacccaagtaccgcccgctgttcctggaccacttcgacaagaaggaagcggaagcggccaacttcgtgaccaaatcgaacaatcagcaaagttacgacgatgatagctcttcgccggaagatcaggacgcgtccccgcagcgaccacaacctcaggtgcaaactccgagtaagcaacagcagcccacggctccgcctctaacgcagagcctcgatgagcagcagctgaacgaggagcggcagcgatttcaatcgcacttgcagttgcagctcaatcagatatctgccgttagccccaatatgcatcagcagcagcagccgccacaacaggtgcagtaccagcagtccccagtggctgtaactcccgatgggggagggggaggtggtggcggtggaggaggcggaggcgggatggaagctcacaatcgcatttacaacaataggatcaatttgattgatagcgaatatgattcgttgaaattcctcaactacgaacagctcgagcagcggttggccagcatcgacaaggagatggagaaggaactagcggaaacgaacaaacgctaccacgccaagcggaagcccatcatcgacgcgatcgaggccaaacagcagaagcgacagcaaaagcacgaggaattctgagtttttccatctgcagcggggcatagttttgggcttctaacgcccgcagagatgcgcgaagtaaaagtgctataaagaatcccacttgtagagaaaacagaaactatagtaataggaatcaaatgcaaagacgtcattttaggaacctacactgatgtcggtttagttgaaaattgattatttttaagcgataaaaaaacaactttagtgagcattcaccgaatcaaaccattgattgtcgttcgttttcatgctgagatttttgccacgagcgaaagcaaaaaaaaaactcagatgcatctaggaattcaagcaaattttagttttcttgcatttgaaattgtttatttatgcagaagctccgcgacacagaaggacgacttcccgactgcctgcaagcctgaaacggagcggaatcattttagcgaaaaaaaaaactaattaagtgctattttaaaaatggtgaagcaaagtatagatcattcgaatttatgaactaatatctattaaatttgtattactttgaacaacagcaacaagaaaaaaaaaacaaa

SEQ ID NO: 727 - DNA, 6024 bp, Aedes aegypti
atgaaaagaaattcattcaatgcggcggtatactatccaccggaaatcattcgcaaaccgtcgaaccaaggcgtccgggttggcggagtggcaacgtttttctgcggggccagaggtgatccacagccaaacatagtgtggaggaaaaatggaaagaaaataatgggtacccaatctcgctactcggtcatcgaatctaatggtgtttccatgctgcggatcgaacctgtacgtgccggccgtgacgatgccccgtacgaatgtatggcggaaaatggcgtcggagatgcagtatccgccgaagctacattaaccgtctacgaaccggacaaaacgccatcgggtttcccggtcatcactcagagccccacgacgcgagtaattgaaattggccacacggccgtaatgcaatgcaaggcaaccggaacgccgctgccgaagatctactggatcaaggacatgaaacgtgtcgacatgaccaatccccgctacagcatcaacagcgaaggaagcctccaaatagacaacagcgaagaaagtgacatggggcggtacgagtgcgtggcagaaaactccgtcggtacggaacacaccaagcaaacaaacctctatgtgaaagttcgacgtgtgccacccaccttttcccggccaccggagcccatctacgaggtgatgttgggaggaaacctgacgttaacctgtgtggcggtaggatctccgatgcctctcgtcaaatggcgccaaggaattgatcaggatctaacaccggagaccgacgtcccggttgggcgcaacgttctggagctgagcaacattagacacagtgccaattatacctgtatcgcatcttctacgctcggggttatcgatgccaccaccctggtgaaggtgcaatctctccccgcagcaccaactgacgtgacaatatcggaagttaccgcaacacaggtgcgcctagagtggtcgtacaagggaccggaagatctccaatactatgtaatccagtacaaaccgaagaacgccaatcaggcgttcagcgaaatcagtggtatcattacaatgttttacgttgtgcgaacgctgagtccatacacggagtatgagttctatgtgattgctgtgaacaatatcggtagagggccgccctcgtcgccagctacgtgcactaccggagagacagagatggaaagtgcaccgaggaacattcaagtgcgcccgttaagttcatcgacaatggttatcacttgggagccacctgagacgcctaatggacaagtgactggctacaaagtgtactacactacaaaccccagccaacaggaagcatcctgggagtcgcagatggtggacaacagcgagctaacgaccatctcggaactaacgccgcacgcaatctacaccatccgggtgcaggcgttcacttcgatgggggccggtccaatgtccaacccggtacaggtcaaaacgcagcaaggcgttccctcccaaccgagcaacttccgcgctaccgatattggcgaaacagctgtcactctccagtggtcccggccgacccactccggcgagaacatcgtacactacgagctgtactggaatgacacctatgcaaacgagcagcatcatcagcgaatccccaacaccgaaacgtacacgttgagcagtctctacccggacaccctttactacttctggttggcggctcgatcgcagcgtggtgaaggagctaccactccaccaatacccgttcgaaccaagcaatacgtacctggtgcaccaccacgtaatataacagttgaagccaccagtccgacgacgatcaacgtttcctggctgcccccgccagtggagcgttcgaacggtgccatcgtgtactataaagtgtttttcgtcgaggacggccgctccgatggggacgccaccgtaacaaccctcaactccaccagcatcgtgctggacgaactaaaacgctggaccgattacaagatctgggtactggccgggacaagcgtgggcgatggaccccggtcctacccggtcactgttagaacccacgaagacgtgcccggagagccacaggacgtgctagcagtcccagtcaattctaccaccatcaaagttacatggaagcctccgaaggagaaaaaccgcaacggcattatccggggttatcacattcatgtccaggagatgcgcgacgagggccgaggactgctgaatgagccgatgaaattcgacgtggtggatgcgatggagtataacgtcactgccctgcagccggatactaaatattccgtccaggtggctgccttgactcggaaaggcgatggagatagaagtactccaattacggttaaaacgccaggtggcgttcctgtcaggcccactgttaacctgaaggttttagagcgtgatccaacggtgtccattgaactggaatgggaacggccaaagcaaacgtatggtgaattgcgtggtttccgtgttaaatggggcgttcgagagcatcctttacaggaagagccaatcctgaatgaaaatactttaacaaaacgaatcaacgatctggagcgaggtgtagagtacgaattcagagtagccggtatgaatcacattggtatcggacaagagacgatcaagtattatcaaacgccggaaggaacaccaaccggcccgcctacagatatcgttgtaagattccagacccccgatgtggtctgtattacttgggaacccccaacaagagagcatagaaacgggcagataactcggtatgatgttcagttccacaagaagattgaccacggattaggtacggatagaaatacaacgatgcgaaaagctgtgttcacaaatctcgaagaaagtactgaatatattgttagaattagagcatacaccaagcaaggggctggtccatacagcgagaagaaaatcatttccacggaacgggatatgggtcgtgctcctctatcagtgcaagctgtggccacttctgagcaaactgtcgaagtttggtgggagcctgtgccgtctcgcggtaaacttgtgggatacaagatattctacaccatgactgccgtcgaagaccttgacgaatggcaaacgaaagttgtcggagttaccgaatcggcagatctcctgaatctagagaaattcgcacagtatgccatagcaatcgctgcattgtacaaaaccgggcctggaagactcagtgagaaagtaactgtgaaagttaagcctgaagatgttccgctaaacctcagagcccacgacgtaagcacacactccatgacccttaactgggctccaccaatccggttgaaccccacgaactacaaaatttccttcgatgccgttaaagagtttgtcgactctcaaggtatacctcaaaagcaagtcctaccgaaacgcgaaattgttctgaaaagtcatagcgttcaacataccatctcagacctgtcgccttttacgacatattttgtcaatgtcagcgcaattccaaccgattattcctataaaccacctacaaaaatcacagtcacaactcaaatggcagccccacaaccgatggtccaaccggacttttatggcgttgtaaatggtgaagaaattcaggtcattctgccacaagcttcggaagaatacggaccaatatcgcattactacttgatcgttgttccagaagacaaatccaaccttcacaaacatccggatcaattccttacagaagatttactcccgagcaagactcgatccgaacgactcaatgcaccgtacatagcagctatgttcctgcaaaggaacatcccatacacattccaccttggatctggcgaaaccaatcacaattttaccaacaaaaagcttgaacgcggaaaaagataccgaatctttgtccgagccgttgtagacactcctcagaagcatctgtacacatcgagtcctttctccgagttccttgctctagacatgaaggaagctccaacaggagaaccgccacatcgaccgaatcccaacgtgccgcaagatccggaaattctcatccggggtaaaagtgaagaacctggaatgatttgggtcgttggacctattatcgctgcactcgttctgtccttccttttagtaatcatttactttgttaagagacgccggcagccgtataaaacacccgaccaagctgcagtaactcgcccactcatggctgccgatttgggagcgggtccagctcctaccgatccggtcgacatgcgacgtctcaacttccaaactcctggaatgatcagccatccgcctataccgatctcggaactagccaaccacgtagagcgcttgaaggcaaacgataatctcaaattttcacaagaatacgaaagcatcgaaccgggacaacagttcacctgggatcactcaaacatggaagtcaacaaacccaaaaaccgatacgcaaatgtaacatcgtatgaccatagcagagtgatcctgcaaccgatcgagggcgtgcccggatcggattacatcaatgccaactactgcgatggctacagaaagcacaatgcctacgttgccacgcaaggacccctacaagaaacgtttggcgacttctggcgaatgtgttgggagttgaaatcatctaccatagtcatgatgactcgattggaggaacggtcccgcattaaatgtgacatgtattggccggcacgtggcaccgaagtttatggcgtcatgacggtgacaatcacggaaactcaggaattagctacttacagcataaggacgttccaaatttgccgtagtggaagcaatgagcgacgagagatcaagcaactccaattcactgcatggccagatcatggcgtaccggatcatccggctccattcttgcagttcttgaaacgcaccaaggtactcacaccaccggattcgggacctatcatcgtacactgttcggcgggtgttggaagaactgggtgctacattgtgattgactcaatgctggaacgcatgcgtcatgaaaagatgatcgacatttacggccacgtgacctgtttgcgagcgcagcgtaactatatggtgcaaaccgaggatcaatatatcttcatccacgatgcgctattggaagcggtcatctgcggtagcacagaggttcccgctagaagtctccacaatcacatacaaaaacttatgcaaaccgagccaggagagaacatcaccggaatggaaatggagttcaaaaagttatcaaacgttaaggccgactcgtctcgcttcgtgacggcgaacttgccctgcaacaagcacaagaaccgactggttcacatactgccatatgaagcatctcgggtctgtttgacaccaatacgtggagttgaaggtagcgactacatcaatgccagttttgtcgatggctatcgataccggaacgcgtacattgctgcacagggaccgcttcaggaaaccgcggaagacttctggcgaatgttgtgggagcacaattctacgattgtcgtgatgttaacaaagctcaaagaaatgggaagggaaaaatgtttccaatactggccccacgaacgttcggtccggtatcaatgctacgtggttgatcccattgctgagtacaacatgccccagtacaaactgcgcgagttcaaagtgaccgatgcacgggatggatcgtcgcgcacggttcgccagttccagttcatcgactggcccgagcaaggagtgccaaaatcgggcgaaggcttcatcgactttatcggtcaagtgcacaaaacgaaggagcaattcggccaggatggtcccatcacggtgcactgcagtgccggcgtcggacggaccggcgtgttcatctcgctcagtatagtgctagagcgaatgcagtacgaaggggtgctggacgtgttccagacggtgcggatactgcgatcgcagcggccagctatggtgcaaacggaggatcaataccaattttgttaccgtgctgctcttgaatacctgggctcattcgaccactatgccaactaa

SEQ ID NO: 728 - DNA, 4059 bp, Aedes aegypti
gacagtcttcattgttctccactggaccgggcctacaaaagcatagcactagcacactatccggagcacgtggcgtggaacccgttcgatgcacatgggatctgtatgctttccctaccacagggcttgcggtttcgtacgcagaaacacaatatagagccacggtttcacgcgtttgccaccacccgagaggacggcaagcggtgctacgggttcagcttggtgttctacgaagaagttcgcagccgggatatttgcaatgccatgcacacgctccaatcgatgttcatcacggagctttccacttcgcaacaacctcccccgggaactctgcgacgggtcaaggaaaatcccgtcagtcgatccttgccgcgacagtttaagatagccgcacaagcccacacgtctgcacttagctattatgatattaccaaggataaactgtttgttgcgaaaagcatttcgctcgtctgtcaggtgccgtacgctcacgttgctgagctatttcttaggaatctctacaagtgtcttccccgccaccccggtgctcggctcagcctggagagctacgtgtacaacatcctgtacgaagtgtccactcctccgccagggaagtccatacgtatatacataccgccggatgaccctcatctacctcccatagcgacaatcttgcaacgacctgccctaaaagatgaactaccctttatggatttcccgctgagactgttgttcacttacctgagcgtggactgcgtcatccagctgttcacctgtgtgctcctcgaaaaccaagtactcctccgatcttccgactaccagaagctcaccataatagcagaatgcataacatcgctgctatttcccttccaatggcaacacgtttacgcaccgatcctccccgcttctctccatcacttcttggacgccccagttccattcgtgatgggcctacattccgattccgacaacagcatccgcatcggaagtgaagccaatctctgctacgtagacgtagacaaaaaatcagtacagctcccagaagagttgccggcctttcctcatcggcacgacttcatcgcagaaatcacggccgttctcgacaagtatcaagtacctcgggatcgctccctggacccgccctccattcttagtccaaagaatctcctcaaagaccacgatatgatgacaacgagctgcacgctaccatcgggaatgcacgtccgacgaaagcactcactgcacgacgttctggactgggaccgaccaaactctccggacatgccacttccaccgacggccgttcccgcccggccggacgtccgtcaacgaatcgtggatattgtacggcgcagcggaggcgacgaagtcgattccggtaccaacgaagtcatgcccagcgccaagcagaagcaacccctcaacaccctggaacagtactacgaagatctgagactgaacaactcggtccgggagattttcctcaaccggttcgtgcagatgtttgccgcgtacgagcactttgtgattctaccgaaccaggaccgagacgaatggcttagcaaccgcgaatctcttcacaacttcgataaggcgtccttcctgtccgatcaaccgcagcatcatcggccgtttctgtcgcagttcctcgagagtcagatgttcgtcacgttgatcgacaacaagatcatgctctccctgaacggggacgtggagtacaacttgaagctgttcgacaatcgtatcaaaattctaaggaaacgctacggtggcgaaagtatgatccgcacggcaaactacgaaccgtgcattttggccagggaaacccagaagcagctggataagcgactgggcagcgtagacatggaggtggcacccccaagtgagatcctggacaaacgaccgccgtactaccggagctttccggtgctggagaagggcgtactgaaccaggagtgcgcttccaggggtagcagcctcagacgggtcaagaacggatccaagtggaaggtgaaggaaatatccttggatggcggtggcggtggaggaagcggaaacaaggagaacgatggcggcaacaagtccaaccgaaactcggcaaaccttaccgggacggagatcagcccggctctgatggctcaggcgaattgggcttttgtggaaaaactgctgaaggactgcaaaagcaaaaccaaacggatgttgctggagaagatgggaacggaagcgatcgaactgggactcagtggagaggcgtccgtaaccggagtcgaggagaatacgatgatcgcttcgctgtgtgacctgatggaaaaggtttggtcccatggggtagtgaacaaacagggaaaatcggccctatgggctcatctgacggcgtatttggacatcaaggataagactcagggcaagcagatggggaacaactatttatcgccgggtaacataacaaacaatggtaaatccactaagtttaccattagtcccatcattgtcacacccagcaattctagtaaagatctatcggctctggccattgaaccagaacttcactcgtcaccaacccgaggccgctccaagtctcgggatcgcaaaagtctgggacctgagcagctacgtccgctacctgaatctctggaatttgatattaggaatatccaagccatgacggatatcaagacccacattgggtacgcccgtgcctgggtacgattggcactggagaagaaactgctttcacggcatcttcgttcgctgctcaccgatacggcactgttgaggcagctctacaagcgatctgccttcgtacgtagcgacgatgaagttgaacaattcctctaccacctgttgacactgaatgcggtagactacttttgctttaccaacacctatcctacgaccattttgccgtatcgggttgtgatattcccttcgaaaaagggtagcgctgctaccacttcggccaacgtgtggattgctatctccggaacgctgggcgaaacacagcagattagtgtgccgcgacattcattggaatttgtgtttcatcacaaaacccttggtatactaacatctttgcgaatcggccatgacgacactggaatgtcatccaaatggctggttgaacacgtagtcatcagaaacgaagttaccggacacacctacaaattcccttgcggtcgatggttgggtcgaggcatcgacgatggctccatcgaaagactactgattggacaactggtacctcgaaccgtggatagcgaagagcttgtggaagcctgtcgtactccaccgcgcacacgaagtcctagtatacagcgaccagaagttcgcccgtcagacattcaacacatgctgggcgactgcgtgaacgcaatcgtcaaatggcactaccgacctactcgcgagcgagatgccagctcactcacaaatctactctgcggtgagaacggcctcgtaaaatgtcttgagcaggcgttcctctgcggattccgctcgcaacgcctgttcggacgaaatctatacctctgggattactttatacgggtcaaggagcagttcgagaccagcttggtggaggagtctgttgatatggttcgtggtggaggctcagctagcaattcacctccaaccagtggatccagtcctgaatcaccacctcaaggatctactacgccacttcctccagtagctaaacaggaactctcagcagtttggcgatgctactgccatctgatggacgaaatcaacaacgtcaaacagacactcggaaaggatggtcgcttccaactatttatctgtcttagcatacgggaacacctcctgcaccgcatgctggttccgatggcgtacacccgggtaaccactgaaatgtacgaagagcagagcttcatgcgcaagaaaggtctactgacattcctgaggcaaattctggaaccgctggatgagttccacatagtgctggagaactcgatcactcagggaattggatctcactgttaaacaaaaaacccgttgaaataatggcacctcaaaataaatcgcattaagtaactcctc

SEQ ID NO: 729 - DNA, 2402 bp, Aedes aegypti
aaagtgcagtgccgaagaagaaacccaaaaccgtcacaccgaagccactcgcacagtccacagagtggtaagtgggatagtagttgtgttgtgcaggaaaaggtacccgaaacaccccgccaaaatacgtctcccgacacgatactagcgaaatgttgccgaaacgatcccgtttgggcgaggttcgtgggccgatctcgaacggaccgatgcagtcgcggccgctggtggccctgctggacggccgggactgctcgatcgagatgccaatactgaaggacgtcgccacagtcgcgttctgcgacgcacagagcacatcggagattcacgaaaaagtattaaacgaagcagtgggcgcgttaatgtggcacacaatcatcctcacaaaagaagatctggaaaagttcaaagcgttacggataatcgtccgcatcggcagcggagtcgacaacatcgacgtgaaagcggccggcgagctgggcatcgccgtgtgtaatgtgcccggctatggcgtcgaagaggtcgccgataccaccatgtgtctgatcctgaacctttaccggcggacgtactggctagcgaacatggttcgagagggcaaaaaattcacaggaccagaacaagtgcgggacgcagcgcagggctgtgcaagaatacgaggagacaccctgggattagtcggtctgggcagaataggcagtgcggtggcgctccgggcgaaggtgttcggtttcaacgtgagcttctacgatccctacctgccggacggaatcgagaaatcgcttggcctgacccgcgtctacaccctgcaagaactgctattccactccgactgcgtgtcgttacactgtacattaaatgaacataatcatcacttaattaacgagttcacgattaaacagatgagacccggtgcatttctagtgaacacagcccgcggtggcctagtggacgacgaagcgctggcccatgcgctcaaacaaggccgaatccgggcggccgcactagacgttcatgagaatgagccatacaatggtgccctgaaagacgcccccaacctactgtgtacgccccatgccgccttctacagcgaggcagccacgaccgaactgcgcgagatggcggccagcgaaatccggcgggcaatcatcggcaatattccggactgcctccggaactgcgtgaacaaggaatacttcctacgatcgtcgacgggcggcggtgccggaggatactcagaaggtggattacaacaagcacatagtacaacaccgctcgaggcaccgcacagtgctggatcccacgggccgcccagtggtcccccgccaccgtcagtcgccgtaccacctgtctccgctgtcacagcgccaccaccacaaggttcaccccgtctgccatcgtccggattccgctttcccgtaagtcaggagttaggaaccacagccgcactcaagtaaccgagcgcgggccagctataagagaaatgtgacgactaggtatatacaagtagatgtaaaaccatgctaataaacgtgagaggaaagtgaaaaaacggaaaccacgatcagacaaaaaaaaacaagttttaatctaaataataagaacaggaaaaaaacccctaaccgtatgctttaagaatgtaagagaaaacatagtaagagatcgaaaacaaaccgctacaacttctaatgatgaacacaatcttaagtcaatgcccccttaatgatgtgatgatgcaacatagatgaaagtataacactccaatggtaaaaaaaaaatcaaccaggagaaacattcgatctgtagattctccttctgcaaatttgagcgaatcaatccaaatctctctgagtagtttcgcaacgctccccctcactgttctggatagaatcgaattacaaaaggcattcagaatcattgctagatattagtccattgtagtgctgagcatttgttaactgaaagaacaaaaaacacaaattgaggaaataaacgaaagaaaatgaaacactaagctcgtttcaaatcaattagtgagaaaagaagatatacgcgttcactgaaataattaaaacaaaatatatgttgaacgagagagagagagcacactttacagcacatcatccattccgttgcgcgcatctacgttacaaaaatacagccagccagaatcgaaattcaagaagattaaccattttagggagagtttttgagagggctcagataactgtgcaacaacaacaacagctacacacaaaagtacgatggcgaaaaacacagaaacgaaaaacccgaacacttctgtaaatgtgaataaaaagttagatggcagaaaccgtgaatgaaaatggaaggcatataaataaaatctgaaacatgggtaaaaattacaataaaaagta

SEQ ID NO: 730 - DNA, 1881 bp, Aedes aegypti
gccaaacacggggatatcccaccatgatcatacgtgacaacgtgtccgagcgattcaaataaaaaaactagtgaaattccacggttattgatggtaaagtgaacaacgcgtgaatgtgttaatgccccttgagtgagtgaacaacaacagagttcagtataggcgacgctttgcgacgcgacggacgcggtacgaatacagcgtcagcgtagatttggttcgaagcgaagtcagtttttgttttggtttcgatcgtttatacggtttgctgaaatctgttgagtctgagtcattcaatcttcattgtcgacggggtttcggtgtggagcgcccggttcccgttggtgcgtttgctgatttcgcattcggaacccaccgcgaagaatgctgaagaaggaaaaaccgatgctgagtgtagcggcgatcatccaggctcagggacggtgggatcgaacactgcctctggcagggttggcaggtttcgatgccgccctcgttggtcacatgggcccgctgtcgccccaggacatgaaacccgatctcaaaccggacatatcgctactgaatggcagtgtgggcccgttttcgccgggcaacaactgcggtcctgccagtcccggcgcgttcaaccaacaggtcgcggcagccctgcagcagcagcaacagaatgtcaacagtctaaacagtcagcagtccggtggcggaggtggaggcgggggagggacacccactactcccaccaacatgagccaacagtatccgccaaatcatccgctcagcgggtccaagcatctgtgttcgatctgcggggatcgggccagtggaaagcattacggtgtctacagctgtgaaggatgcaaaggatttttcaagcggacggtacggaaagacttgtcctatgcctgccgggaggacaagaactgcacgatagacaaacgccaaagaaaccgctgccagtactgccggtatcagaagtgtctcgcctgtggcatgaagcgggaagccgtccaagaggagcggcaacggagttccaagttttccattaagagtgaagagatcaactcgaccagttcggtgcgggacgtgaccatcgagcgaatccatgaggctgaacagttgagcgagcagaagagcggtgataatgcaatcccataccttcgggttggatccaactcgatgattcctccggaatataagggtgccgtctcacatctttgccagatggtgaacaaacaaatctaccagctcatagactttgcccgccgtgtgccccactttatcaacctccctcgggacgaccaggtcatgttgctgcgatgcggctggaatgagatgctgatcgctgccgtcgcctggaggagtatggagtacattgaaacggaacgctcctccgatggcagtcggataacagtccggcagccccagttgatgtgcttaggaccaaactttacccttcaccggaacagcgcccagcaggctggggtggatacgctgttcgatcgtattctgtgtgagctcggaatcaaaatgaaaagactggatgtgacccgagctgagcttggggttctcaaggctatcatactgttcaatcccgatattcgagggcttaagtgccagaaggagatcgatgggatgcgggagaaaatctacgcctgtttggacgaacattgcaaacaacagcatccatccgaggatggtcgattcgctcagctattgctgcggttaccggccctgcgatcgatcagtctcaagtgtctcgatcacctgaactttattcggctgctcagtgataaacatttggacagttttatcgtcgagatgctcgacatgccgatttaaagtatcctagaacaagcaacttgtggttaaaatcaaactaaa

SEQ ID NO: 731 - DNA, 2694 bp, Aedes aegypti
aactcattcgcacacgcgtgaaatttcagtgcttcagtgcagtgcagaaaatcgataatttgtgtgcagtgtccgattccatctgtggagtattcagagtgggaagttcccagaaggcgattagtcacaggtgctgaaagttttcatccggaaggaagagagcaaccttcttgcaagcggtggtgtaattccttggcaaggtgtaaatcaagcaattcgcgaagcgctagtgcggagccccatttagttcgggacggttctgcttttgtaggagagaaggaaggaagcaagcagtaacaaaggaagagagcggagaggcacaccatgcaaggtgttctattgcacaatattgctgctgcctgtgataataaataccgttcgtcatcattggaaattagtgccaacaagtgctgtttgttgtataaaactggttctcccagtcaaggaactttcataagcgccgagaaaacccacgggaactgttgtcctacgagaaggtcctgatcatcgtcctaataggttgaagggcaaagggattatacgcccagttacgtgagcaacctgcacgctaatcaccggatttgtcctagtgaaagaatcgaaaagggtcggaagtgttattaagcaagaagcaaatttttatatatttagccaacaactagtgaaatagcgaccaacagcgactcgtgctcgtaattgtggaagtgtcgaaagagaacagcgcagaaaaaaagagaggaattggggcttgattttgaaatcggttgccgaagccgaagcagtttggatttatttgtcgtggcagaagtagccagaagcagccgtcaagatagggtccgatagctaccgcggcgggaggaagtccagcagcaacaagatgccccgcaatcggaggaaaaatatggccaacggcaacgcccatcacaacaacgactcggacgacgatacgtccaacgacaacgccagcgtgtactcgtgccagtcggaaacgctgaacgatgcctacaacaacaacacggacggcgattcgacccaaacggaagccggttccggcttcgagaagcacgaggaaaagcttctgcaagcgatcgagaacgccacggacaagtcgctccagacccggatcaacgcattccaagtgatcaacgaaacgctcgtccatcactacatcccggacttcatcgatgaccgcaagatgacgctgatggatgcgatcgaaaagtccatcaagaagggcaagggcgccgagcaggcctgggcagcccggatcatcccgctgttggtgatccaactggaaggcgcacaggaaatcaacggaatgatgaatgtgctgaaaccggtcttgttggcaacggcccaagatggagccgcttcgtacgatgctcgcgccaagtgttgcatggccctgggcttgctcaacttcctcggaaccgacgacatcggagatcttctgccactaatgaagaacttcgagggtatcttctcgggaagctacctcaagggagacagtagcccaagcagtgccaatgcggacgcagctgccctccacagtgccgccctgagcgcatgggccctgcttctcacgttgatcccatccggagatctggtatcgctcgtcaacggcaacaatcaaatgattccctcaatcaacaaactggtcggtatgcttcagagccctcacctggacgtacgaatgatcgccggagaaacaattgccttgattctggagagtggtcgctcgcacgacgagagcttcctcgaggacgaactacccgatctgattgaagccacgcaaaagcttgccaccgatgcgcacaaataccgcgccaaacgggaccgcaaggttcagcgtgcgacgttccgggacgtgcaccgttacctggaggaggacatctcgccggaaatttcgatcaaatttggcaaggaaacgctgctcctggacacctggtccctgcaccatcagtacatctgcctgcgcaatgcgttgggattcggcatgaacgtgcacctggccgagaatgagttcctgcgggacgttttggaactgggcgccaagatggacgaactggagcgcagcttaaaggtggccaaggcggagaagaagttcatcaatgctgctgcgttcaaggctcggaccatcacccggggcaagaaccgcgacaaacgatcggccgttgtcaactagaaggggcgggaagcgggtggtcgttgttgtacatagaagcgtgtgatttatacctacttttttttatgataacttggatttactttaggtagtagttatccgattttttctttcttttgatagtaaaactataatattgtttgaaatttacgttaacgttaatgcttgatcgatacctatcgtttcgcaaatttgtcgcaattgggattgtcttcgaaggatcagtccaggcaaatcttaggtacatattgaatatcgtttgaattgaagaaacatgttaagcaccgaatttcctatgtagtagctgtggttagaattgtcgaacgttcattactagtatgatagcccccgtcgtataaaatctactcaatattgcaaacaaccggtaagtttaacatagtggaaggaataacaaattgcatgtagaaaaatcgtttatgtgtaaaccaataaaatcgcaactagtttcgttctctatatagaactagaagtgatcctgaaagggcaaa

SEQ ID NO: 732 - DNA, 3130 bp, Aedes aegypti
tcatcggttgtagaaaaggtgtaaaacattagtgtagtgtattttttccatcgccccgtcgtcttctttggctttgtggcctccggaaccatcagaaaaaagagtcatcatcatcgcgcggatcgtcgtctctcggagtgctgctttttgccttcagtttttttcctcatttcgggtgatataatttcgatcagcttcttgccgcagtggtgaccaaaatcttgagtgtggaaaacaaggaagagttgtgcaaaatcctgtattcgtaaaagtgcggagaaaaaagggcgattctgtcctgtctgtgtgtgcgaaggaagaaaaaaataactttcgcgacggaaagtggccgcggcggggcgaagagcaaagcgatatcacaagagtagttgcacaagttgacggacggacgggagccagaaagagagaagagacgaaacgaaatcatccatccattcattcatctgaccccccgaggctaaagagtagggtgtcccaaaatttcacttttttcggaaaagaagagctcaagctctaaaacgaagaagcagcagtagaggcacagaggaacaaaaaacggaaaacctgtctcaagaagcagcaccagcagcgagcactctactacaccagcatagcagtaccaaataatggcgaaaacgtacgactatctgttcaagttgctgctgattggcgattccggtgtcggcaagacctgtatcctgttccggttctccgaggatgccttcaacacgaccttcatcagcacgatcggaattgatttcaaaattaggaccatcgaattagacggcaaaaaaatcaaattacagatatgggacacagccggccaggagcgtttccgaacgatcacgacggcttactaccggggtgcgatgggtatcatgctagtgtacgacatcacccaggaaaagtcgttcgaaaacatcaaaaactggatccggaacatcgaggaaaatgcatcggctgacgtggaaaagatgctgctggggaacaagtgcgagctgaacgagaaacgacaggtaacccgggatcgaggcgaacaactagcagtagagtacggtatcaagtttatggaaacttcggcgaaagctagcatcaacgtagacgaagcattcttcacgcttgccagagatattaagtgtaaaatggaaaagcgaatggaagccaacaatcctcccaagggcggtcaccagctgaaagcgtcagaacaaccccggaaggcaccgagctggttatcgaagtgcaatctattttgaccttgtaatagtcctataaattattgtaacttttttatataacatactaactaaaataacggtaaactattataattatgtactgtgtagaagaagaaaaattgagagcgagagagtgagagctaaaagatatggggacaggaaaaaaacgaggaaaaatcgtcaacaaattcaaagaaaagcacacatacacaataacccacgataagaacttggacagcataggaacgtttggtcattcggaaaagcattcgtctacgagtgaagcgcccacaaattgatctccccagacagatagtttcaatttctttttaatttatttccattgtaaacccaataaggcatgactgtgtaggaaccagacacaccacaagacgaccaccaaatgagtcgataaaataacttatgatgtatgtaaaaccgatatcgagtgataagattatggaaccgacagacaaccggaaaaccctgtttgaggttgaaaagctgcaaaaccaacaatattgtgtaacacacgagaaagacattctcaatgcccagaactccacccagatgtaacggacaggaaacatttaaactattgtatgccgctgtaataacgtacaattattcacaattcctcgaataataactttgaatggatctagctaagaaaacgacaaggcacgatagtaacgaagaaaaagaaagatatccagaacaactccgctagagttttgaacaatacttgtgaataactttagatgtgattaataatcttttgaatagaaaccgttcttcgtgtgaaccccaacgaattgtaatactgcacagtgtttaaaattgtcgatttcgatttcgaagtttcttggtatattaaatcttttggttcaaaaatttctttgaattatccagctagaagtgggatagagagtagtgtgtcgatcaagttgtggggtgagtgacgtaatcaagatcaatcgtgttcggttcgcattgtgcgagaagatattgatgttctatgaaggatggattaccaactggtgagctcgtttcatgcttttgataacacaattttatcgtggcatcgttacgtttatgtaattttctatcaaactatggatgatccgtcactacaagtatcggcataaacccatattcctgtttcatataattttaatatacacataccctttttcttttcgtcattactaaaaatatcctttgaatagttcaatattataaatgtggaagtacattctcaatcttctaccaatatctttccaccacgagacaaaaatgcaaaactagttttaagcaagagtcgcatttttctccttatccatggatcgcatcaccaatcatcaagatgactcccagatctttttcctccctcactaatcaacaccattcttgtggtgataatggcgttaggcaacacacaattaatcgaacaatttttggcatttttagatgttcttcaattaccaagaaacattcacttaaacagtacagactctatataaaaaatgcacgaaatcgacaaattcgaacgcagtgaggatgtgaagattgcgtcttgtagcagaactatcgcaggatgttattcaccgctctttttcggagcttctccactacataacatattataaactccagaaggttgtttgtgacaaaatacacgaagtacgggttgtgggattttggtgtaaacccctccccttccttttcaccggaagggttgtgcaagcgatgggcgaactggacgggatggaactcatgaaaattcaattgtcgtaattagcatacgtggatactacgaataaaaatcgttagcaaacaagggttcgaaattgtggtgaagatttttcttcgca

SEQ ID NO: 733 - DNA, 3508 bp, Aedes aegypti
ttatttttgaccgtcgtttcgttcggacgcgcgaactcgaagcttatcagtgtgtagtgtggaacacttttcccacacggattttccagcgaagataaatagtgtgcatttggaagtgaacgaacgggcagctgcaaaagcaactatagtgagtgataaacgatagaacggaagtaaaatttggaccagttggatacggaagcaccagttgcagaaactacagagattcaggcacgaaaaagccacaaacaacaatcgttcgcctcgctctgaaccacacaggaaccggatgtagatcaatgaatccgacgaacgcgacgacaagcgaggtgacaacgacgacggggacgacgccctacagcagcgccacccgtcgatggtggtggtatggggtactgttggtgatagtcgtcggactggggcttccgtcggcggtggccctgagatgcgaccggacaccggagggatccggtgcgagtaaatcgcctgccgatgggcgcttccggctcaggatttccggcaatccggacaagtacgtgcccggcgagacgtacaccatcagtctggtcggcatccggtccatgcaagtgccccacaaattttccggattcttcttggccgccgaaaaagaactgacccttagtcggccggagccacaaaacaacggagcactgcaccacgtgggaacattcaacctgctgggggatgccctgaccaagttcagcgaacgctgcccaaatgcggtaacccagaccagttcgataccgaaaagcgaaatccaggtcaactgggtggcgccaccagccggaagcggctgcatagcgatccgggcaaccgtagtggaacaccgggacgtgtggtacatggacgatggtccgttgagcaagattttctgcgaagacgaagcggactccgtggatactcaaccaccggttctaaaggaatgctgcgcatgcgacgaagcaaagtacgaattgacctttgaaggcctgtggtccaggcatactcacccgaaagatttcccttcgaacggatggttgacccgattcagcgatgtcattggagcatcccacaccgtagactatcgcttctgggaatacggccaagtggccagcgaaggattgaagcaagtggctgagcatggttcaactcggatgttggagagtgagctgaagaaccaaagtgacaaaatccggacgattatcaaagccagaggcatatcgtatccgaatgtgacagggaaaacgttcgccgtattccgagttgactccaatcatcacttggtgtcgattgtttcgatgctggacccctcacctgattggattgtcggggtttccggactggagttgtgtttgaccaactgttcctggattgagaacaaaatcttgaatttgtatccatgggacgcaggaaccgacagcggcccaacctacatctctccagaccaaccaaccaatcccccggatgcaatccggaggatcaagtcaaactatccgaacgatcctcgttctccattctacgacccgagcggagcggagatgaagccactcgctcgtatctatctctcccggcaaagactctacgagaagaactgcgaatccgatgacgaagacaacgaatcgaaacaagcgtgtgaaaccgaaccgtgggacgagtggaccgagtgcagttcccgttgcggaaagggtcgtcaaactcgccgtcggctgttcaaatacccggtcaaggcgaagcaggccgactgcaagaagaagctttttgagaggagaccatgtgtgggcccagaacgggactgcgactaccagaccagccaggagttggacatcatctaccagagtgatccggagtgtgaagttaccgagtggggaccgtggagtgagtgcagtactccttgcggtaagggtaacaagactcgatcgaggaagtacaagaagaagggagcgcgtaagaagtgtgaacggatgccgaatccaccgaggctgcagcagacggtaccgtgcagtgaggagtgcgccggggacatttcgcagccggtgatcagcgctaatatcaaccccgagtgcaagatgtcgcagtggtccgagtggggaccgtgcagcgtaacgtgcggccttggtcgcaagatgcgtacccgtatgccgttgagcgctgccttgaacaccaagttgcatcacaagcgattcgtcaactattatttggcgagaaggcgcccgaccatgaacgatgacgatgaggacgaagacgacgattccggagccgactacgacggtggcttgacgaccctggatcgggatgatccgtgctacggggtggaaaccgtagaggaggtcacctgtggccatgatctgccggcgtgcgatggactgtacggagttcctgaactttgcttcctggaaccgaaacctggcaattgtcgggattcacagacgagatggtactttgacagcgacaagaatgactgttcgattctattctttacgggatgcggtgggaacaataataacttcatgtcccgtgaagattgtttggacacctgcagtaaagatcgtaaattcaccaacattccgatcagagatcagacgatcatcaactccgactactcgtcggacttcaaacaggactgcaagacttcgcactggaagcgaggtccatgcaatgccacttgcggcgaaggtttccgcgtgaaaagtcgaacaattctggctcatccatcgaacggtggtcaccggtgtccacggaaactccgcaaagtggaacgctgctttgtgcactgtgactcctctcggcacgataccaatccttcgtggggacccagcacccggtacacgccggaaccgatcgagtgcgactattcggcctggtccgcgtggtctccgtgtagcaagacgtgcggcgattacgccgtccagcagcggacacgctacgtgctgaactcggaacacgctcggcactgtccgcatcggctcgaggagcgaaaatgtgatataatgccctgtttgctgggtaactgagaaggagtgacaggggaggcgagatttgtttattgttttactgaaatactcgtttaacagatcgtagttgaagcactttttagactgtttgtttaactgaatactcactacacaatctctaaggtacgtttactaatcaagttgaaacagattaatttaacagataattatttcaaacattgtaatcaaattgattggcatataatgatgtaatcacaatatcaacaaatatgtataagtaaaatagggaaacaacgttttttgtacaagacacatacacaaacacagacattcattggtataaacgatgaacacataaccactgaataattgatcaaaagcaatgatttgaatgtgtaaaaaaggctaatccatatattagtagtaatgcatgtggcgacggtgtaacaacaaaaccaaccaaatccaatgtttaaatgaatcaacaataaagaaacctgggtgactattagaagatgaaactgcatcaaccgaaa

SEQ ID NO: 734 - DNA, 2389 bp, Aedes aegypti
atgttcattcataaaactttacaagtgtgcgtgagaagcgacgagataacaactggaaataaaatcctggccaccctaggcgagggaacgtttggcagggtggtgaaagtcaaggatttggaaatggaacacaccatggcactgaaggtgatcaagaacgtcgaaaagtaccgggaagcagccaagctggagatcaacgccctggagaagatcgccgaaaaggatccaacttttcagcatttgtgtgtcaaaatgctggactggttcgattaccatggtcacatgtgcatcgcgttcgaaatgctggggctcagtgttttcgactttctaagagaaaacaactacgaaccctacccgatggatcacgtgcggcacatggcctaccagctgtgctacgcggtcaaattcctgcacgaaaacaaactcacccacacggatctgaagccggagaatatcctgtttgtggactcggagttcacgacgacgttcaacggccgaaagaaccgtgaggtccgccgcgtcaagtgcaccgacattcggttgatcgactttggcagtgccacgttcgatcacgagcaccacagtacgatcgtgtcaacgcgccactaccgggcgccggaagtaatcctggagctgggctggtcgcaaccgtgcgacgtctggtcgatagggtgtataatgtttgaactgtatctgggcattacgctatttcaaacccacgacaacagggaacatctggctatgatggagcgtatattgggtacaattccttaccgaatggccagaaaaacccgcaccaaatacttccaccacggaaagctcgactgggacgagaagtcgtcggcggggcggtacgtgcgcgaccactgcaaacccctgcaccggtacgtgctggcggagacgcccgaccacctgcagctgttcgacatcatccgacgcatgctggagtacgatccggcaaacagaatcacactaggtgaagccctgcggcatccgttcttcgcaaagctcccgccggcgcagcgtttgcacgagaaatgtaatgaaaattccgtctcggccagtagtagccgggagcgttcccatagtttatcgagatgaaattcggaacgatttgattattattaatttataatatttacacaaaacactcatatacctacaaaagaaaagaagggaaaacactaagaacctcacctacgaagaaaaaggaaaaattcgcatagtaacgcaaacacacacattgagaaacaaactccaacgaagaagaaagtctttgaacaacaagggaattaatataaaacaaaaagaaactttcgagaagtaccatgtacggaaaaaagtaaccatttacttctccggaacattcacactcataacaaaacacaaacaagaattttatcgaacattagaaaacaaatggaacaagagtgcgacggagccctataactacgcatccaagtttagtagggaaaatttaaggggaacatggctgccgtgtcgtcgtcgtctcgcaatggggcgggacacattaggatttcaacaaattgagtaggaacgcgagcgaatggagtttttgttctttttttttaaggcagtgttgtaaaattcgtgacaggctcgatcgttttcgtaggttttctttattttttttttcgctatcgctaagcagtgggaacgttccactgcaattttgccaccttcgtcgtccgtaatatatgctttatctttatatatctatatattcagatttaatatgtgaagcttgagagaaaaaaaaatatcggttagcaaacaaatctctttatgtcgaaagttttattaagtggaaaaaccggaaaattttgcaattttctttgttcattgtagttgtaggcaattattttttaataaattggtgaagaatctgaggagaaatccgccaattggctcgatcgatttcagagagaagtggtttcttctttttccgttgttgtcctatgtttgtgaatgttttgttactcttctcggatcaccatttcagtagatcacgttcaacctcttgaaacattcttcctcatcaatggggggtgggacatttcgcataaagacgtttcgccaaaccatgtggaatggtgagatgacatcggctctgtaatgccctatggcccctgagcctgacaagtgaacgatgtaagttaaaaaaaggcgttttgcatggtttcaagcgcgaacgtgttgcataatgaacatttggcacttcttcaaagtgctaaaagttcttatatgaaactgctttatgggatactttcattatgcgaaatgggccatccctctcatcatcattgttgtcatcgttcgttaaaccaggtccttccagatgtgagagtttgagtgaacaacaacacat

SEQ ID NO: 735 - DNA, 5648 bp, Aedes aegypti
ccatgagcgaccgagagtcgggtccatgtgttggtgtgctggcatttcatcacacgaaatttgttgaatggtccggcgctgtttggtccaattttgacgagattttcggatctgagcatttcgactcggaatcgatgtttacacccgccaggattcgacattcggctagcgtgcggttccgttcaagcatgggagctaatagggcagcggctgctaactgcccacgcgctcccctgtgttggtgatcgatcacattctctactgaatgaaattaatgtttccgctccgagtcgggcactgattgcatcgttccctccactcactcatacagtgtggcactgtgtcgcctatttgcgctgcggtgcagccgttgtctgggtggtggtgaacgcgcgcgcccgtttcggtttcggttcggttcggtcggaaagcacttcaaccaacatgacttcctgtgcggctttatgtggtggtagtccgagtaggtatgctctgtggcaagcgtgtgggatgttgggttgggtgtagcagagcggcagaggcagcatatgtgtccatactgtatttcgtggcggatggctcgggcgtttgtctatcgcgatgttatgctgaatgaataacaccggtcaacgtagtttgatgtgttttatgaatgaatgtaggtcggtctcgctagaagccgtgtttagtgtgatatttaggggtgatttgaagctgtgctcgttctgtgctgcgcgatcagcggtaattgatctctttcggaaggcgattaaaacgatgacggatcttggtggaccacggctgaagacaacacatcgaagccgctagtgtaacgagctacatggatcgcagaaatggcggcgatcctttggcgcctcctcggccccctaagtccttgcctcgtgttcatcgtccccgggctcctgagccgaccataatgagcgctgccaacagtaccaatcaatcttcagcgaacaacagcgcaaacaatacgacgattacgaatcgaagtctccataacgtacagcaactgtcaccaaaacctaggaatctaagcgcttccagttcccctgcgcgtaaccttagtagcaatatattatcatcaattccaccgccgttgccacctcaaatagcgcccttgacaccgcttcacacccgaagcagtagcaacagcagcagcatcagcagtagtagtcatcatcatccgcaccaccaccaactttctactagtagtatcgttagcaataatctagcccagccagcaagtaccttctcgcgacgacgtccaccggcagctttaccaactaactcgacaccgagcattttgaacccaagcattgagacgacagcgtcgactacgacgacaacgtctgcctcatccccggtcaccctggctgcacctagaccagagaacgaaaggcttactaacgagtatgtcgatacaccgtttagtagactgtcacctgcatcgaaccgtcagcgggggcagcatgctattggatccgcggcgaccaccgggtcggcgacgactccgatgccttcggtggcatccagtatcgaccgtcaccatcaactatcagtatcgcaaccaactaataatcgattacattcgcctagcactatccatagtagcaatagtacaacggtgtcgaccatcggtaagccaatcggatccacggcgacaaccaccacgctgcacagcagcaataggaactttaacaataatacaatcaactctaggccaaaccaattaccactggggcaaacgacgtcttcgacggcggcaacgacaacaaccacgacgggaacgaccggtatgcccttatcgggagcaccgacgatacagtcagcgacattgccaattaccaaacaaccagtatcaaacaactttagcaaagactcatcggcagccggtctgcacgagcttgacaccgatctacacccatcaagtggtgatctacttaattccatcacctgccctcagtgtaaaaagtgtcggtgcgaagaatgtcaacggccgcgacagctaccttctcgatggctttgcgataaaacctgtctctgcagtgcggagaccatcattgactacgcttcatgtctatgctgtgtcaaggcgctgttctaccactgttcgaaggatcatgaactggaacgcgaaagcgatacagtttcctgtgcagacgatccctgctcttgtgttccccataagcgaacgactcgttggggctgcctggcggccctctctcttccactgccctgtctattgtgctactggccaatgcggggttgtgttgccatctgtgcgaaatgctacgcaaaacattcccgacacggttgccgctgtcagtcacagaacggtagcagtctcgccgacagtatcctcggtggaacaggcctgggcagtggtagccttggtggaggtggtaacggtgggtcacaaggtggtaacggcaatctggatcacggtagcaatatcagcagcaaattctccaccgtcagtagtactagcccgttcagcaagggacaccaccaccatcatcatcatagtcaccacaatcatcatcatcatcattcgggggatcttacgcccgaaaagcgcctgctcgattccagcccggagtactgatatatgctgtatctgtaagcgggcaacgaaggaggcagcggcggcagctgatgccattttcgagaaacaaggcccgctggcagagatcatcacgatcgcatccggcgttcaacggtaaacaatagtaggtagtagtaataataataaactcggcgagcgcaacagacaatgcccgcgcgtactctgtggctatatgtaggtagaagggaaaacaaaacgtataaaaaagcgaagagcaaagttcgaagcatatataggaatgggagaaatgttttttaattataatttaaccaaagactgcagactattattgagttatgttttttgatataaataatgtttttcgtgtaatgcaagcgaaacgaaccgacgaggaagatgcaaatctgtaaattatccactaatatacgggcttaactatggattgcttcaaacagatcgagaacgaagcaggatgaaagtcgaatcataaagtcatactacccactactactactattacacaccttcctactactgctaggtttcgttacagaaaaaaatgaatcaatacagctacagttactaaagaaattcgaagagcaggtagatccattaggacgcgggaaagataactaatttattctaactgtatacagattttaaggcaaatgcgcaatctctcaattttccagagaggttaacatttttttttctactgagagcgtagaatgcgttcaccaaaacggcgaaagtctacggtgcgaatggcgttcttcttgtgtatagggaattagataggacattttccaaatggctaggcggcacggcgaattcagggaagcgagaggatgcgcgaatgaatctaggtgtggacgcgaggaatcattactgatgttttctgttcataaatgcgtaatttatttcctacgttccgttttgtttcaagcaaacaagtgtatggaataatgcaagtgtacgattgttttcgcgatattttagaaatatcggggaaatgcgagtaagtcgacggaattctgagtgcacgcaagtcaatggccggtaagacgagaggttaggtaacagctgtcagagggaactgaaagcgaggaactcttgaagcatatagatgaaacagagttgaacaaaatcatgtaaataagtatacatatttatccaaaacaaaaccaagcgactaatttaatgtagggcgcccgtgtggcaaacaaagaaactattttcttaaaaaaaactgtacgattgaatgatgctgtatataaaccgataggaagcggttcgcaaagaaactgaataaagggaaaacagatgataagcatatttatatttaaatacacgcgaaagaaccactgaagaaatgtaatatattttgggagtgttctagtttttgtttgaggcgaagagcgtgagcgagtgtgagtgtgtgcgcgattgttccacgtgaccagagtgtttggaagagtggcataaggcgtgaatgtagtgcgttattcttctgtgtaaatatttaccacacaggaaaaaggaaagaaagcaacaaatcagcattatccggtacgaaccaattgtatttcagacgaaaacaaaatccactgcaaagagcctatgaaacgagcggcagaaaaaacagtcatgcgatcagtgagcaaagtttccaaaaaaaaaaaaaagaagagagtggtaggttcaaaacaaaaggagttaatgttgctggcagcggcttcggctcgaaacgcgcgatccacgtggtttgcggcggcgaatagacgctaatcactcgtgtgaatcgattgtggaatgacaagtatgcaaaaattatcacgctcccaatcactggctgccatagccgagcaaacaaacaaacaaaaaaatacgaacccaaggttcaacgggtgtgaatgtacttttcgcgatcatatcaacgacgctcaagcctcgtcgtcagtaaataccacagagcctccggccctgctggtctgcgggaaaaaatcggttcattgttatttaaattgataaaagcgctgattaaagtgatgcattcaccacgtttccgtaaatgttgtttttttttgttcagggtgtgtgattgtgtgcgtgaaagtattcctacggcaaggggctctccaatggtggcaggttttttttttcctctgccggtacatatttttccgaagcgtcgatcgatcatggaggggcttgaccgcgcgcgccgcaaccgacttaacagattgtaggaacacttaggaatccgctttacgacgtgtgtatggaaggagaatgaatccaccatcatcagtgcgctgtcccgtagagcgacgtgaaatatttaaacgtcggtgataacctatatggttgcaagcgaacataaataacagataatattttagtcagtggagcgctgaatgtgcctgaacggaaaccgggagcgagaaaggaacatttggctcacggttgatgtgggcattgaagtgtattttatgaagcaaattatcattcagatggatttacttctctggatataaatttgggcttgtgtcggaatttgatcggaatgaatggagggaaaaatggattcaatagagtcctaaattctcaattgttgcacctcagcataagcttgcagtagaaacataagtttattatattaaaacttttacaatttttgagtttttgcaacacccctagtttttaattcatgttttggaagaactgtattttccgtgtacttttcgtttcatgcttcgaatgtgtcatagttaaaattttaacctaattagtcgttatcagagcgagaaagtttgacaaagtgctcgtaagaacttgttttgttgtgtcatcaaataaaaattgagatgttaggagtctattggtgacaattttaccttggatagtaaacttttttgtagaatattattcaagtacaaagttgtttactgaacacaatagtgatcatttatatgagagataagcagaagtaaactggaatgatttggcaatagaccagcagtgctgagtttgcttggcg

SEQ ID NO: 736 - DNA, 4421 bp, Aedes aegypti; identical to SEQ ID NO: 396

SEQ ID NO: 737 - DNA, 2910 bp, Aedes aegypti
atggaaaaggcgaaagcctacatcaaaaacgaattacgtgggggctccttgacatcgcattcggagcccccggcaaccagtcagcaacagcatcatccagcacaatccctgcaccaccaaccgtcgccaacacctcaacagcaagctgccaattacgatgatccctccacaatctgctacgtatgcggtgcccgtggtgcccaggatcagttctacctccgggtgcggtcaaatccggagcgcccaaatgagccatactttcccctgctcgaaacgcacacccctccgaatggcgttccccagtggacacccgcccagctaggggtgcgtgcgtgcaatctctgcttcacagccctggtcaaacaatgggaataccacgaacgggagggtaaacccatcacagagagattgtactggctcaaaaggaacgatggaaaaagtttcattggtgccgaaatgtccacccagggcgaatatgccactcaggtgctcggtctaaatccggaacacgtgcctaccagtggccgatcgctaacgcctcagtcgcaacatatgagttcttatggtagaatcgaaagtcccaatagtttagcaaggcctcggtcacaggaccatcccggagcggttggtcctctgcctcaacattaccaagtagctagaaatgaaagtccaatccggtctagctcgcggaacgaatcaccgcagggcaaaaccgaaccataccatccaaccaagcggtacatcgaaaatcacataaacaatagcggaagctgtagtcaacagggttcgaggccttccagtcgaaacgaaaaaagtgtcacaccgaggcctatgtcgagagaaaacccctcaccggtggcggtagttcccagcacaacgacatccgccattactcagccggcaacggcgtcaccagtgctggctggtcggttcgatggcatgaaaatgtcctcgttcgcccaccacaaactgaaaattggtaattacgccaactcactggcagcatcggtaccggtctcctcggttgccacaccgtctgccaacaacgcgaacgataacaaatcaacttcgtccacatcgtcatcgacgcatcggttggaggaggaaagtgcactggatttgcggaacctcccgatgcccggcgcgaccgatattctggacctgtcgatgccggacaaaaactcggtgacggaagtgtgctacgtgtgcggggatgaacagaggcggggcagcttggtggaaatttccaccgtcaagccaaaggatggcaaggaccaggagaaaccgtactttccgattttcgacgagacgcatgctagacccgcccgttcgcgaccgaaagatccaaagggtatggtgcaagcgtgcaaaacttgccacaactatctgatcaaccagtggcatgcgtttaataaacagtgcgtaccggaggcccagcggaagtaccagatccggaagcggcaacccacccaggaacgggcggccacattcgtctgctacacgtgcggcgccgatacgctctcctcgcagctgaggctggtctactgctgtcccaatgccgaacgggaaccatacttccctttcataaaaacgatgaaagcaccgaccaatgctagtccgataagtcctcagggtatggtgcaaatctgttcaacgtgcaataagaagaacgaacatcggtccgaaggtggcaccgtaagcaatgtcgaggaaaggtatccgtctccgtcaaaaatgacgtctagtgtgataaacgaggttgtacgatttaagccttatgaatctccttccgctctgcctggaccgctacgggatcagaaagacttccggagggattcaagaccaaatacaccgcctcactctcaaggacctgttgaaaacggtcatgttttttcgtgttacatttgtaagaataactttcccccgcaatcgatggagtggctgtcaacgagtgccgaacatatgaattcgcatgcaatgcattttccctgcctcaaaggcaacaacgatcagggtccgggtcgggtgctggcgtgtaaggcctgcgtacaaaacctcaccgtccagtgggagacgatggatgccgaacgggtgccgctcgagcaccgcaagtacatcattccttcgccgacaccaaactcgatatcgcccggcggcggtggcgtcgtcgtcgggcagtatcgaccaccgatagccctggccacgccgcccaccacgccggcgggctcaaacgcacccagtacctcggtgtactgcttcgtctgtggcctacattcagagttaaactttgctaggttaatatatgccaataaagagggttctagaccttattttccttttctgttaaaacacaagtcacctcccaatgcggaacagttacgaagtgatagttctgcgttggtttgtacattttgttatcactcgctgttgaatcaatggcggaaatatgaagctcaaaatacggttcctccgggcaaccgggagtacaacttccacgactactgctgccacctgtgcgggatcacaacctatcggaagcgagtgcgtgcgttgcccatccgggaataccccttcgtggcgaatcgaaaaagcgacggactgctgctggagaacggcgactacgcagtggtctgtctcgattgctacgaaggcctgaggcaacaatcagccgaatacgatcggtggggtgtggcgatcgagaagcgggagtacaactgggtggcacaaccaccaccaccggaggacagtccggatgtgtctgtcgcccgcctaccgagcggggaacggactgataaagtcaataaaaattctcaagtaggtctacgtccaataccaaataagaagaactgttctccaaagcaagttagtaacgataagcagcgagatgcaactcgaagcggtatcgcttag

SEQ ID NO: 738 - DNA, 858 bp, Aedes aegypti
atgcataacatcaaatctctcagtctatggcaactatcagacggcaaaagcttcatccaaatgatctacaccagcgacggtcagctcatggattgcgaatacatacggcagaagaagcttgtcttttcatttctgaatcgcttctacgatgagattgaccaggctcgttcccgaaacttcacatcgccgctgacggtaccaaagaagcaccactcgctggtctcggatcacgatttccgggagttcatcgataatggcatcgttacatccgaaatggaagatctccagtacagcgtacaggaattcgctaacggacagtcctccgctgcggacgctccggatgccttcggcctccgaaatctcacctacattcagctcacgagcgaagatgaactgccgaaggatctccacaaacagctaaactaccgaagactgaagcatcagtgcgatcagaggcacgctcagatgcgaaacctcgcccatggattgcagagtagtgatccacaggagcagcagactgccggcgaaaccttgcaaaggcataagcgcgctatcgccgattggttcctatcgccaaacaccaagtggtgcggcaagggacactcagccgaacgttaccatcagctgggaggcgcgtcccgggcggacatgtgctgccggcagcatgactactgtaaattgaatattccgggtatggccaccaagtgggacctgttcaattaccgtccttatacgattagccactgtagctgtgatcaaaggttagtttcacatcgggaggtgggattggtagattttagtcttggggggataattcgagaaccaaacagatacaagagttggtaccagtttttctag

SEQ ID NO: 739 - DNA, 3005 bp, Aedes aegypti
atgctgctgttacataccggcgaaactcccttccagtgctcgtactgtcagaagaaattcacccgcaaagagcatttaacgaatcatgtcagattacatactggagaaaccccctttcagtgtacctattgcgaaaagaaattcacgcgcaaagagcatttaacgaatcatgtcagaatacacactggcgagactccgtaccggtgcacgtattgtgagaagaaatttaccagaaaagagcgtttgacgtatcacataagatggcacaccggagaaactccttatcattgcacatattgcgagaaaaaattcgcacgaaaagaacatttaacaaaccatgtcagattacataccggtgagacgccctatcattgcacctattgcgagaaaaaatttacccgcaaagagcatttaacgaatcatgtcagattgcacactggagagactccctatcagtgcacatattgcgagaagaaattcagtagaagagagcgtttaacgattcacacaagaatacataccggagagaccccttatcgatgcacatattgtgataagaaatttaccagaaaagagcgtttaacgtatcacataagattacatactggagagaccccctatcagtgtacctattgcgagaaaaagtttacccgcaaagagcatttaacgaatcatgtcagattgcacaccggagagactccctatcagtgcacttactgcgagaagaaattcactcgaaaagagcatttaaccaaccacacgagattgcacaccggggaaactccctaccagtgtaactattgccaaaagaagttcaccagaaaagaacacttaacgaaccacgtcagattacacacgggcgagactccttatcagtgctcgtattgccagaagaagtttaccagaaaagagcatttgacgaatcataccagattgcacactggagagactccttatcattgcacctattgcgagaagaaatttatgagaaaagagcatttaacgaaccatgtcaggcttcacaccggtgattcgccgcacaaatgcgagtactgcaacaagacgttcactcggaaggagcatctcaacaatcacatgcgccagcacagcggagacaatccacactgctgcaatgtgtgcaacaagacgtttacacgaaaggagcacctgattaatcacatgagccgatcgcacaccggcgagcgtccgttccagtgcgatgagtgcggcaagtcgttcccgctcaagggcaacctgctgttccaccagcgcagccacacgaaggggcaaccgatggagcggccgttccgctgcgatatgtgcccgaaggacttcatctgcaagggacatctggtgtcccatcaacgatctcataccggcgaaaagaatcaccactgcccgcagtgcagcaagtcgtacgtcgagcggggcaacatgctgcggcacatgaagaagacgcatccggacgcagtgataccggtgctaccgaagctgccgcacataaaggtggaacccaagtccaccggtgagtactcatcaggctcaccagttgcaccaccacatctcgccatcgatgcatctgcccccaccaaacccccaacagctggcagcactcgccctgcatcatcaggtggcccagcaacaacagcaacaacaacaatcctcaccctcaacgggccgagcacagccttctcctcgtacatcacatccgccgccgcagcagcagcagccgcttccacagcaacagcagcagccggtgccgctccaggtcccccaggtgccaccgggccccccggaaaaccaacagcagccccaacagccgcagcagcagggcccgggccaaactggacccctgccaccaccacaccatacggtcccggttactattataacccacgctggcacaattaatccgatgccagacggtctcaataatcgggttggcacgattcagatgcaccacctgaatgcggcccaggcagaagagcacacggtggtttactaaatcaagatcaactctaatcagaactagtagtagagtttgcatgcccaagtctgactccaccaaagactaaccatgcgatccacataaggaaggaaacagtacagatttgcaattagtagtttttagatcagaacaaacacattgtaggaggaacattactcgtaaccagtaatagacataatggaaaaaaatgtatgcgacagaagaaaaaaagtactaaaacaaatatgtaatatatacaattatatatacacgaaaacaacaaaaacaaacaataacaaaaaagatggataacatattggatcggtatcagatatcgataaaaaactaactgaaagtaataagtaaacataaaattaaacaaaaacagttgcaaaacaacagacacacaaaataacggtaatttagtgaaagagtaacaaaattggaaatatgctaaagtgacgtatatattattagtagtgacagcaaatgcaacacaaaaagcaaagaaactgactgtttacaacgttcttttttgttcgatacgtgcaaacagcagcattagcagccagtcgtgatagtaagagaaacccaacagacaccgttataaaaaagcagtgaataaaacataaaaacaaacacaaaacccttaggtaaagctattacaagatgatcatagaaatcaatacttaaacaagtaagcaaattgttgaaaataggtgaaataaacaaatagtaattgattttaccccgcagttgaataaagtaaaacaagttaatcagagaactgaacgcaggagaaaggttgctggacaaactcaagcgaaacactggaacacaaagttttcggcacgggaaataacaagagataggatgcgcaagttcgattcgagcctgaactgaagccaaggatggaaaccaacaacaacatcaactgttgcgaacaaagcaaggcaacactaaatgaatagtacaacattattaaacagtaactattaattaatagagaaacaaacat

SEQ ID NO: 740 - DNA, 1386 bp, Aedes aegypti
atgcctcatggtctcacttcaacccagcagccattcaacaacgagcgggggagttttgaattgctagacaacttgacaacaactcgtctgttcgtttctttttcacttttccgtcctgcagcacagtggagtaaaattcataaatttaaagaggaaaaacttgccgcatccattcatctcccagctgggccaatccggggtgtcgttgccaacggtctgaacttccaggacttgatggtacgtttgggagccatcgattcaccgccaaagactccaaccattctgggcttcgagtgcgccggtgaagtcgaagccgtcggcgaggaagtcgaaggattcaaggttggagaccgcgtggttgcgctaccagaattccgcgcctggtccgaactggtagccgtcccgaccaagtacgtgtatcacattccggacgagatgacattccaggacgccgctgccatcgtcatgaactacctggttgcgtacattctcatcttcgacctgatctcactgcgggagggcaagtccatcctgctgcattccgtcggcggtggtgtgggacaagcaatcgttcagcttgcgcgcaccatcccgaatgtgaccatcttcggtgtgtgttccaagggtaagcacgaagctctggccgccaccggattgatcgatcacctgatcgacagaaccgactacgtcaatgaagtcagaaaaatcacaactgaaggagtcgatgtggttatggattgcctgtgcggagaggagtgcaaccgaggctacgggctattgaaacccatgggcaagtacatcctctacggttcatccaacgttgtcaccggagagaccaagagcttcttcagcgttgctcgttcgtggtggcaagtggacaaagtatcgccgatcaagctgttcgacgaaaacaagagcctggcagggttcaatttgcgacatctgttgtaccaacaggacggttcggcttacgttcgttccacagttgacaaaatcttcgacctgtggaaggatggtaaggttaagcccgtggtagacagtgcctgggctctggaggatgttgccgaagccatgcagaagatgcacgatcgcaagaacatcggcaagctggtgctggacccggctatggaaccgaaaccgaagcctgccaccccggccaagaccaagtccaagaaacaggccagcgaagacaagagcagcaaaaaagacaagtcttcggagaacggtgacgacaaaaaagatgaagaagctaagaccaatggcgaggaaggtgaagcagctgctaccactccggaggcggtgaatggtgacagtgcggaaaagaaggaggagccggtcgccaccaatggggaggccacggaaagcgagaaaaaggaatcgagttga

SEQ ID NO: 741 - DNA, 4789 bp, Aedes aegypti
atagaattaagacttatctatacgccctatccagaaagaactcccgattcgtatccgtccctgacagcaattttccgcattttacttcaactattttacacagccctactcggtaaaaagcgtcgccagcagagaaaacgatgacgcacattttcacacgcttgttcctcagcagccaaacaaagacaacaaatcaagccaacatcgtagcccgttggcgaaaacgagccggcacatgaaattcgatcgccaccagcagagcaagtgcctttcttcatctctcccgtgtcttccgtctcgctccggcgcacacaaattacgaccccatcgtcaacgaccacaaaaaagcagccgtcgtcgtcgtctgtctgtcagttgtcaactagtagtggaagagaacggttcaaaacaagtgaaactcccgtgtcggtcgaaactctgttggtgtatggtggagattttcctcgccccaaaacggtcatttatcgcggtctgcccccttcgggacccggacctatcgctactggagcccagcaggaaccggaaaagggcacccccggaacggaccggatccatccgtggctagattactaccaatcacgccgtgaatcgaagcgaacgggatcatcgcccgccgcgggttctgccacagacgttcctgaggaacgcatgccaaaccgataatcggttcttgtagcacgtgttccgcctggtcgttacatgttcgtaattggtgccagagactcgcggaaggaatgattttgaagtcaccctgcgccgtgccttctactgtaacaacacgtcccacgagagcaacgagaccgagaggacagtctagattgaagcgagacgaaccggaagtagtcgcggtgttattgggaagacgacgagcaggagtgacgtcgtgaaatgaccatcatcctcttcctggtggacacgtcggcgtccatgtgccagaaagcgcacgtcaatggggtccagaaaagctatctggacattgccaagggcgcggtggagacctttctcaagtaccgacagcgttcccaggactgcatgggcgatcggtatatgctgttgacgtttgaagatccaccgaacaatgtgaaggctggttggaaggagaaccatgccacgtttatgaacgagctgaagaatctgcagagcaacggcctgaccacgatgggtgaggcgctgaagaatgcgttcgatctactgaatctgaaccggatgcagagcgggatcgatacgtacggacagggacggtgtccgttctatttggaaccatcggtgatcatcgtgctgaccgatggggggaagtattcgtttaggaacggggtccatcaggagattattctgccgctgcatgctcaaatccccgggacgaagctcacgaaggaaccgttccggtgggaccagcggctgttttcgttggtgctgcggatgagtggaaaccgggcggacgaacgggtcgatgggaaggtgccgcatgacgaatcgatgatcgagaagatgtgtgaggtcacgggtggccgatcgtacaagatccgctcccaatacgtactgaaccagtgcatcgaaagcttggtgcagaaggtccaaccgggagtggtcatccacttcgatcagctgctcacgaccaacaatggcgaaaacggcggcggaggcggagctgatctacagttccagtcgatcaaacgcatgatctacgtacagaagcacccgcagcagaaaacatttccggtgggcttctggcccatcccggaaccgtactggccggaccccaaaacgagtaacctgccgccgcgagatgctcatccgaaaatcaaaataattaccccgtgctgtgatgaaccggttatgctgcggaacttcccgatcgacaagtacgaactggaaccgagtccgctgacgttgcaaatcctgtccaagaaggaaaccaacaaggtgtggccgctgatcgtttccagcgggatgcacgggatcgagatgcctttcggttttctgaaaccgagcagcacgatgaccgtggtgaatctgtacgtcttgccgtacaactatcagacctttctgccactgatcaatgatctgttccacaagtacaacctcaatcccccaaacgattggatctacaagtttagcaattacgtgaaatcgatcccacagtactattgtccgtttctaaggcgggcactggcatcgacaccgaatgtaccttaccaactggtgcaatacatactgccggagaacttggacagctatctgagtccggcggtggcgaactatctgaaacagatgaagaacacggccaaacaggaccaggagaatttgtgtttgagggtgttcaagcagttaaagcaaccgaaaccagcctaccatcagttggagacggtaaagctgaatcctggtctgcagctgaagcgtgatctggtgtcgcatccgatgttgaaggatgcgttcaacaaggtccacgcggacattgctagtttcgataactacacgattgtggtaccgactgtgatgagaccggcttcgacgaagaactaccgcaacccgttcgatatcccccggcgggatctgatcgacgagattgctcgaatgagggagaacttcttccggctgccgaccagtggaattgcggtgttcaccaaggacagtgggcactgcttgccgattgcggacatgggtaactaccaggagtatctgaagaacaaggacgcacccctgagggagctggaaccaacgaacgtgcgacagcacatgttcggcaatccgtacaagaaggacaagaacatggtcatggtggacgaagctgatctgaacgagattgcaccgatgaagggcggacgaggcgaagtggcaggggctttgaagaatagaaccgatccaaatgcaagactgagccggaagcggaaagcgggaccaattaggaaggattacgtcttcaaacggcggtgtttcggactgagcatgagctcttcatccagtgtgacgtcggaaacgagttctctggcagatttcacatccgatgatgatagtgcttccgtgatgagtagcatgggttcggaggcggatctcgatgacgaccaggacggtcgattagtggtagactttgagtttcccaacgacaaggatgaggagagtcctctcaatgcacacgtccgggaattcatcgaaggtccggacgaaggtggcagtattggcgcgggtccacctcctccggattcgataaatatcgccattcccgagtatccgattcctgccccaatgccctatcatcaccttcatcatcacccgccacatccacatcaccaccatctgcaccaggcgattcctccccaggttagcctcgccgtgccctcctcgagcaccacttgtttgccaccactgaccaccggaaacagcagcacctccaccagtagcagcacttccagttccatcagtttagcatccactagcgcggcgtccaacgacatgaacgacgtgttggaaatctccaacatccttaaaacgtgccacaatggcaacaatagttacgctacccctgaggaacctcctcctgaaccggagcccatcaaacctcacaaaccccccaaaccgagtaaaagcgaacacacgacctcaaaaacggacagcacgaccaccacctccgcccctgttagcgaacgtattcttctgaacggaggagaccacttccccccagcgacgtcctcctccaaggcaccttccgctccggtgcggaaagctccccgaccgctctccgaagccgagaaggaacgttgtcgcgaggagaactacgagacgcggaccatcgtcttcaaggacatccggcggcccgggcgaaactactcccaactgctggagcatctccacctcatcaagggcgatctcgcgctcaagcaggagttcatcgaaatgtgcgtccacgaggcgctacggtttcggaggcggaagatggccgacagcatccaggagtggtgggatggccagctggaagcgatgaaacaggaagagaagcttctgctaaaacagcaagctaaggcaaattgtgttaacaatagtagcgcttattcgaatcaccaatccgggagacattcgcgactgtcggccaccggaagtagtagtagtagttctgtcaacagcagcagcagcagcagtagtagtagtagtagcactagtaaaagcagtagtatccttttcccccaccagtcacatccccccaacaagcagcagcaccaccacgggccacacaaacattcgaatcatcagagcggaagcagtcggatatgagaagcgaccggaagtgcacacgtgctgcaactggggcgtgttaaattgtaaatttgtacccgaaacaaaaaacggttagtttcttcttagaattttatttgatcaattgttcaaagtgtagttaaaaaaatgaaaggactgagaacaaaaaggtttagttttttcctgcttccggttagccaagggtgtaaaagtagttcaaaactggctgaaagtgggtgtggccgaaagtggtcgtcgaatgtgcgagcgagagagcctttatataacacaatttgttctacacgaaggagtagtagttttgttaatgtttccccctcccatttttttttttaattttaaaagaaagtatgcaaaaaatgatcacgcaagtaagaaaatttaaaaaatcaaattgaatcactgatgataatggcagaaaaacaaaatgtagcggtaaggacaagagcagttgagtgtaaatagataaatgttaaataaatcgcctacatgataagaaaaa

SEQ ID NO: 742 - DNA, 2172 bp, Aedes aegypti
agctgcaaggtgtgccacaagcagtttgccaacgtgtaccgcctccagcgccacatgatttcccacgacgagtcgacgctgctgcgaaagttcaaatgtaccgactgtgataaggcgttcaaattcaagcaccacctgaaggaacacgtgcgcatccactcgggcgagaaaccgttcggatgcaccaactgcggtaaacgattctcccattccggttcctactccagccacatgacctcgaagaaatgcatcagcatggggctgaagctgaacaacaatagctcttccgtcgctaataacaacggtagtggcagtccaagtggcgcaagtggaaagtccgagaaaagtggacgccgatctggatcttatcttcccggaggaagtccagcagctgccgggctttccaacggacagcttgccaatggtcagaacacgaccaacaatgccaattcgaacacattcttcccaatgcttccaaagtacccgaactacgaaacggctgcattcctggcctcgttcaaccatttgtacccgatcaatccggtcaatcccgcattcagtccctacagtatacagcgtttgatagaattgtctgccggtgcggctgctgacatgatcgaagaggtgaccgagaacgaaaatgaggaagaggaggaaccgaaactggttatggatgttgacgatgatgaggacgaggcaccggagaatgacgaagacgcggagaaaaaagacatcaaagtagatgaagatgacgaggaggacgatgagaaacaaaagtttccaatcgagcggcgttccgttcagccatctccggtcgtccccgagcatcgtctcaccgaagatgaggacatggagaaggtagacgacaagtctccagtgcttcagtgctcacagtgccatgcgaccttcaaccaccaggcggagctcattcagcacgaacaagtcctgtgtcaatcactgctcttccagaaacagatggctgcggcagccgctgcagctgcagccgccagcaactacctaccaatgcacagcggcagcgaagacgatacagacttcgacggctccaaagtatcttcggagcgcagcggtaaggtccgtgtacgaaccgccatctccgaggagcagcaaaacgaactcaaaaagtattacgccatgaacaacaagccaaatcgcgaagaattccaagtgatcgccaaacgcgtcggcatggaagcccgcgttgtgcaggtatggttccagaataatcgatcgcgggaacgaaagatgggcaacctcaccaacaatcgcaccccgatccaaacggaaagctccgcgcctgcgatgttttccgctgatactcccacccctagtcaaccaacggaaaccgatcaaccgctggatctttccgtcaagaagccggaatctatcccttccagttctccacgttacggcacggccccccaatcgcaacccgacgccgctagccttctggacgaagccatgaacctcagcgtcaaatcatcccgaagttccacgcctttcaagggattctatccgtacaaccagttttccactgaaatgatgatccgccaaacgccctcgccgaacgaagccgccgctcctcgtcaaaatcagcagatacgccctccggcagtcgccgccgtctatccccccatacccccaacagatagcgccttcataggaatggatcgcttcctgcagcatttcccctccgaactgacccgcgcaccaatccgcgccgatagtctcagccctggggcggagaagcgggcctggcgcgatctggaacagtacgaagccgccaaactgcttcagatgcaatcgatgctgaacgtgccgaagcgggtgctctactcgacggccaacaccggcaaggagcaaccggacgccgaaggccaatacatttgcgaccagtgcgataaggccttcagcaagcacagctcgctgcagcggcacaagtacgaacattcaggccaacgcccctacaaatgcgtcgagtgtccaaaggccttcaagcacaaacaccatctcacagagcacaagcgactgcacagcggcgagaaaccattccagtgctgcaagtgtctgaagcgattctcgcactcgggttcctacagccagcacatgaaccaccgctactcgtactgcaaaccgtacagggacggcaaataa

SEQ ID NO: 743 - DNA, 3076 bp, Aedes aegypti
gcggtggaggcggaggcagcaacaacaccaacagcaccagcacaaactcaacctcctctagtggtaacagtagtagcaatagtaacaacaacagcagtatgtcctcctatctgtcatcgatggcggcggcggcagcgaggaacagtggcggcagcaacaacaacagtagtgcaaatagttccaactaccctagcagcaatagtgcgaacaccccttccacgacgtcgtcgagcggggccggcagtcatccgcagatgaaggaagagcacgaaccgaacagttttatcaacatcgacgagctgccggtaagtattttgcgacttggctccaactttggcgtcgtcccgggtcactatgacgaccaggaccagtaccactcgctaccgcagccggaaactcagacgccttcgcacggttacctggacaacagcccggagttctactcggcgatccagatggagcagaagtacatggcgccgcactacaaaaccggaccgtacacgagtcgaagtaaccggtaccaccaaccgcacccgcacagtggagtcggaaccgggggaccaggcgctggcgccggttcccagggcagccaccaccaccatcatcaccagcaccaccatccgcaccacgacggctaccacgagtacagctcgccgtacgacactccgccgttccagaccgtgccgagcaacacgacgtccccgcaaggttccggcaacaacaacgacagcaccggtctcggcggccacatggatccctggagccagctgcaccacccgggacaacatccgggccacccgggagcccatccgacgctgctggacttccaacatccggcctacatgggcacgaccatgggcttcgacaagaccatgctcggaagctacggtgcgcagggcggcacgcccttcaccggctccggccccatccagctgtggcagttcctgctggagctgctcaccgacaaaacctgccaaaacttcatctcctggaccggcgacgagtgggagttcaagctgaccgatccggatgaggtggcacgtcggtggggcgtccggaaaaacaagccaaaaatgaactacgagaagctcagccggggcctccgatactactacgataagaacattatccacaaaaccgccggcaagcgctacgtctatcgttttgtatgtgatcttcagactctgttaggatactcagccaagcaggtgcacgaaatggttgacctcaagccggacaagaaggacgacgagtaaactaaagcccccaaagcatgctacttgctcaaagagagaccccccccccccttcacgaatccaaatccaagcgaaagggagaaccagcaatccggcgcttcctgattacgaattgtttccccgtgtgaatcgtgcttccaaaacgaacggcaaaaccgaaaaaccaatcgtgttaccctcattctacctttttgtttaagaacaaacaaacaaaactgtgtttcttcccaaaaaacaaatcgaaaaactatgatcgtacttttacaatgtaccaaaaaaacgcaacacaaatcatcctagcaggctgagacgagcgcggtcggtggagcgcagcaagcgcgtgtgccttaacggatccagaacgagtcaacctctctatctagtagaccaaccctgaacgtcagtcatcctagtaggcgcttgatatggcgcgctcagtggcatccatggcgaccaacagatttccccttcaaagcaaaaccaatcaaatcaaatcgtactctcaaaaaatcaagatcaagatcggctcccccagtcggacaaggatcggaaaggtaagcgaaacttaagtctacttaatcacacacaaacacacaagcgagaaaacaatctgtgagagatcgcgagtcgaattcgctgcagaacagagagctgtctgcagcggagaaacaatagaaaaaatatcaaacaaacgtaaaacaaaaatcgaggtgaagcttcgcgctgttgtgcgtaggaagaaggaacaaagcaaaacaacaaaattttattttattttttcccccctgtagttaaaataattatttgtgaagcttttgtgataagttttttttctttatttctatatatttttagtagaacatacttgcttttatatatgtatgtgtaattattagaacctatccccttagattactcgatagaaaatgtaaaaatcattcaaccgaaaaaaaaatcaatgaaaaaaaaaacggaaattcagcagtataaaaatcatgtgaatgttcttcgtagtgtaatattgttcagtgatcgcgtgaaagagaaactcaaaagagtgactgagcggtgtgtcgttaaatttgagtgaccgagctcgctagttccccgtcgaccgccccctggtaacggttgctatggatatcttttcatcttattttattacttctctacaaatcagcaccccgggagggcggcgacggcggcggaaacagctgatctccacaagttaaaacaaataatcagagtactattactagagcttagtttgcgcgcgattcgtgtttattaaatatgcgtgtgtgtgaaagcgagagagaacgcgagcgaacgagtttgtcccacgaatgcgaagctgtgtagtaaaatctaagtgattatcaactaggaagcagaaatattattgtaaacagccaaggaaaagtatcaaacaaacaaaaaaaagaagtcggatcagaataaaagtgtaaaaaagcaaattgtaaatcaaggatgggttcctcagacaatcgcgcggccagaagcaaagcacgtccgtcccgcgccatcactcacacagatccacccccaaacagggggggtttcacgttggtgcgatgcattttttctaaacgcacacacaaaatggaggaaaacgacggatttcatcaaagtatttatgtatatcgatcaaagtaggtttttagttgctgtcagtgtcatgagatgtgtgagagcgatggtaagggaccggcccacgtgtcgtcatggtaactgtctattgttggctgacggtgttctgaaaaaagggaatcctcttctgttttatgatgtttaaaaaa

SEQ ID NO: 744 - DNA, 576 bp, Aedes aegypti
atcatcagtttgtgctggctggccggttccatcatcgggtttcttccgctattcggatggcacgaaacgccccaagtcgacacctgtctgttcctcaaagtcatggactatgactatttagttttcctctacttttcgacaatcatcacgccggcacttatcatgctggcattctacgcacacatatatcgagtaataattaagcaactccgtcaaatcgttacgatgaatccatccggagggctttcatcggaaagccgtcgttcttcagagagcagccgcatccgaatatcggccataaaacctggccgctgtaaatctaatggacacgggggtacgatgctgagagttttgggcgccgcgcagaaacgagaagtgaaggcaacccagaacctatcgatcattgtgctgttcttcatgatctgctggattccactgtacaccataaactgtgtcgtggctttctgccgcgactgtacaattccacccacgttgatgttgttttgcatcatcctttctcatcttaactcggccgtgaatcctttgctgtacgcttatcatctgaaggatttccgg

SEQ ID NO: 745 - DNA, 1923 bp, Aedes aegypti
ccattcaatcgcggtcgtggagaaatataatcagtgaatgctatatttatactcaatttggcgatagctgttccgatcggtttgtaatgatatgaggatgtgtagcatatttcggcgacggagaggacagtacaaaaatcagtgccttacgattgtgattcataccaacgagttgtgagagcagatattcgcttcacctgttcgattgtgatatgcactaccaatgctttctgcatgattcatcggtgtcctatgttgcacggtagttgtttttttatcgtatggaatttacaagcatcttcgtcacatcaggaacgaagaattcatttttaagattgtatgactaataacccacacagagagccacgtttctgagtcacatgcgtcgctgaaatcaaaacggtgaaacttacttttatctgcgactgtgtatgaagaggtgtatcgtgtgtcgttatctcaagtgtgcattgtgagcggaatacggaaattattgtgtgtaactcttcggaggttgataagtgataaatgagtgtttcaggggtagcgccaaccgaagcgacaccgttgaagagaaacgtgcagacacaactcgtcggtgacaatcatcaaacgcaaacggtagttgtgcatgttggcagtaatagtaccgggagcaacaatagtaacagtggaacctcaaatcccagtagtgaagtgccaattattggaaacgatcaaaacgaaaacatggatgacaccaaacgaatattgatccgtgttgggattgactttgtcattttgtgttgcgttgggttcccaattttgatctttttcctcgtgggccaaccttatgagcgaggatttttctgcgacgatgaatcactcatgcacccgtttcacgattcgaccgtcacgaactggatgctgtacatcataggcatagctgtgcccatattggtgatacttggaacagagctggtacgagctcacgtgaaaaaatcgaatgccctgccgcttaaggtatacagcgtcaccataccatactggatagtggaagcatacaaatcaatcggaatgttcggttttggagccgcctgcagccagctgttgaccgacgtggggaaatataccatcggtcggttacggccacatttctttgatgtttgtaatcccagattgcctgatggtaccacttgtaaagatccacaaaatcatggtcgttacatcgaagatttcatttgtaccagcgaaaaatcatcggctcgtatgttaaaagaaatgcgcctatcattccctagcggtcattccagtttttccatgtacactctcgtttattgtgcgatctatctacaatccagaatgaactggcgaggatccaagttattgaaacactttctgcaatttctgcttatactactagcgtggtacacatgtctaagccgaatttccgattataaacatcactggtcagatgtactggctggagcagttctgggttccacagtggcaatcgttgtctccaactactgttcggatctctttgatgcacgcgcgaaacgcacaaatattttgccacagacacgctatgaactcagcccaaaccacactatttccaacggaaaccagcagtagttgatagtgatagagcttacgtagcatatgtgatttttttaaatctattacctttcatgtcgaaaggacagtcgacctacatatttactatatttattatatagtaatggattaatttattttacgtaacaaacctttcaagaagagacagctatttattgattgaaactgctgcatcctgtaagataagatgttgttttaagaaaatgccgaaaatcttccgtttttttttttgttttatgtcattggcaattgctaagcgtgctacaaaattgtattaataaatataatatttttaaacttcatgat

SEQ ID NO: 746 - DNA, 954 bp, Aedes aegypti
atggcttcgtcaggtggagtggatattcaaatagtatcgatgccaaacctgcagaaaattgaaaactatatgcgagattcgacctatcgggaaacgttagaagtcagtgcatcgttcaacaccagattatgcctagaacggaggatgcggttaccattcttcgattcgcaaactggggtagcgcagaatcacagtactctgtacatgaagcactgtagacggatgcccgggcaccgggaaggtcaactctacacatatccatcatcacggtggcgaaagtccaagcgacagtatctgaccaaaatccaaaacctgcggccgtttagcaattttaaaacaagcggaacctccaacatacctctaggggatactgtagaggtggcagcgactaccgagccagacttcaatgcatcacttctggaggaatcctcgctgggagcgactatggacgccgacagcaaggatagccaccagaatcaacccgcccctaaggaagagcctctacccaaggattggtactacgatgagatggccctgaatgatgatgatctggacgacccggaaggcggagactcggattacgactataacgtgaacgggtacaagcgaaagaccaagaagagcaggcgctcgaacgccggaggaagaaaatccaaggctagtcaagcggcggcagccgctgccggagattacgatgccgtggcatcgccaggcggttcatcccgaaaaggtcgaccaccggggggtagttccggcaaacggggcaggaagcgcaaccagaaggaaacggtttcgtccatcgagaaggagttggagagcagcctgaacgacagcctggtggaaccgccctcgttcgaatcggtggccgctgcggtggatctgaacgagaacggcgagaatggggccggctacggaggtagcgcagatttgaggaactaccggaagtacctgtaa

SEQ ID NO: 747 - DNA, 1849 bp, Aedes aegypti
agttaccccgttttacggtacttctattttggctgctttgatacttcccttttgccctgacatttgggtccagccgtgaagtgtccgttgtctgctttgtcgacacttaaatcaaacttcaggaggctgttgtatgctatccaaaccgtgtagatactaccagtcaagttaaaatgttttctcattctcagcacgaaaaagaaaagctgcaaataaacatctgttcgcattgaaagatgcaaaaggcgaaatagcacagaatacactgtgtaacgcaaaccttgtaggtgataattcaacaacatatttataatcttacatacaacacaaataaagtgaaactttaatcgccccatcctgtatgtgtcatctatctttaacgtttcgttttagaccatcatcgaactgtcggaacgcggaggtggcggcttcgaaccgtccgccttctgctcggcttgcctggtgcgccgtccggtccgatcgaagcactgctccgtttgcgatcgctgtgtggcccgtttcgatcatcactgcccgtgggttggcaactgcatcggcgccaaaaatcacaaatactttatgggattcctctggatgttgatgatcatgtgcgcatggatgttgtacggaggagcaaacttctacgttcaggcgtgcagtgtcaatatggaagaaggtctgtggaacgccattgtcgcgatcgggtcctgtaatccgtgggttggctgggtaatggcgaacgccctgctgcacatgtcctgggtgacagtgctgacgatttgccagacctaccaggtcgtgtgtctgggaatgacaacgaatgagcgtatgaatcgaggtcgttatcgtcacttccaggccaagggtggcaagagtccgttcactcgaggtcccatcaaaaatctgttcgatttcatggaatgcagctgctttggcctggtacagccactgaaaacagattggatgcagtatttcgacttcgacaagcacgtggaacacgaaccactgcttcgaccggataactttcagtacgtctgaagaaagcgaacggaaactgcggcgggagagaacgaaaccgaaaagaaagcaaacgaagaaatcacaactggaacagagcttggagtcggatctgaaacgactggtaatcgacaggatgctccagaacggtttgaagcgcaaactgatctgacaattgcagttgctgatgaaatagcgatggtttgagggtatagagaaggcatttcgttaaagattcttttttccttcacgattgcttctcgctgcttggttttccatttaagattgtgattttaagttgtatcaggtgaatgaaagaacaaagaaaggctttagatagtatagtagggtaaagttaattgaatgtgcttaaatgtgtagaaatctgtattgagaaaagccgatcaaccaaaaaggcgacaaaaagacacgaagtatatatttggtatatatttatcgtaaatgatagtacagatgtttaagcaatagaaatttagttgtagcacgttagatagattgtaaatgttttcccaaaaagtagttttattagaaataaagacgtactagttttcagtttctctcagaattgatcacagtactatcgttttgaaatacatgtattatgtagaaaccggcatatagatacagatacctttccaagagtgaccattctaaatgcaatatacatatgtaaatctgattgacaaaccatagcaacagtcaagtgactgattatttgtttcggatgaatgttttattttttactatgcaatgatagttgctttggcttggtaaaccattaacggttttgcgaataaaatccttgaacacc

SEQ ID NO: 748 - DNA, 3258 bp, Aedes aegypti; identical to SEQ ID NO: 445

SEQ ID NO: 749 - DNA, 3676 bp, Aedes aegypti
actcctccggtcattgtcgccaatgctgtaggggacggcactccgaatgtgcaatcaccggagaaccgcgtcggacagtcggtgttctatgattgtctggacgctagcccaatggtggagaagagaatggacaaatcaccctgcctagcgtcggaaacggatgaggatttgtccgacatcgatcaggagtgtacgattttcagcggagtaacgtatttgggggctactcgtatcaacgctcccaagtcagagaaggaaatcttgcagaaggtttcggagatgaatggtagtgcgagcacatcgcctctcggaatgaaggtgtccgttagtattccaacccggtcggagggattggttgtgctgtacgatggagagtcgaatacagttgtggcaacttacgaggttcatcggattttgttcttcgctcgtggcccagtgaagaccaccaatcaagcgtgctttgcctttacctggtcccacggagaatcgcaggaaactgccgcgcatcagtgccatgtgtttagatgcaacatcccggaagcggtctcacaagttagcgcttgcttcgccaaagccttccagcgggttcttccgccgagcgttccggccagtatgaccacttcgctggcggacagcagcgccaacgctatgctgtcctccatcacgtcggacagcgcaggcaatccgatccagtcggccatgtacgagttcggcatttcgttggagatcaaagagaaggacaagagtagctacacaaccgtcccgcgcgatgccaagtccagctttcggctacgatgcaacaccgacaaggaggtgtgcatcgtggtcaaacagattccctcggagcagtttcccccgttgttcatcgagcggtgcttcggcgttctgctgagccctgggaagattgtacggcaagccgatatgcaactactggatatggtattcgcgccgccaccggtgccaaatccgatgacggcttcgatcacatcccttgccactgcagccagttacgcccagttgccgtaccagatccgtgcggagtggaaagccaacgacaaggcgttcgaacaactcaatacggaaacgcagaagaaatcactgaccgttgcggtcgatctagtcatcaagggtatccaggaaccggtgcgatttgtaatcgaaacatccgtgatgattctgtcgcaaagcgaacttcggatcatgcaaaatctgttcaccaacaaaaggcttctggtgatgcactactatctaaccctgaaggaaagtggcgaaggcaattggaaggtggaatcaatcgatcattcggatgaaatcgttgagcctacgccaccggcatcactttcgttgaacttgaacttcaaaacgtggacgttcaaaacgtccgccagtgtgcaatcgatggagttcgacgactccagtccggactatagttcggatggcgatgaaccgcttctgagtggtaccggcgaagtatccaaagaatgttccagcgcgctgctggaagattggaacgagatcttggtggaatgggatcgtgacaacccggacaagcgaccaaagaatctggcgtacttggttcgcagcggcatcccggatatactgcgagggacgatttggcagaagttggccaacgtggagaacaaaacggatatggctgattcgtaccgtatactgattaccaaagaaaccagctgtgagaatgtgattcaacgggacatcaacaggacattcccggcgcataggtacttcaaggataccggtggcatgggccaggatagtttgtacaaagtgtcgaaggcgtacgcggtgtacgacacggaggttggctactgccaggggttgagctttatagcggccagcttgttgcttcatatgcccgaagaggaggctttttgcgtcctggtagccctgatgtacaactacggccttcgcgatatgtacaaaatgggcttcgaatcgttgtacctccgcctgtatcagctgaatcggctgatgaaggatcagctgccggatttgtatgagcacttcctcaacactggagtcgagtcgcacatgtttgccagccagtggtttctgacgctgttcacggcacgcttcccactgtacttcgtattttccattctggatgcgttcctcctcgacggagtcacggtgctctttcaggtggcgctaacattgctctctgtgtgcaaaaaagatctcctggaactggacttcgagggaattctgaagtacttccgtgtgacactgccgaagaagtgtcgcagcgagaatcaagccaagaagctgatgaagctcgcgttcgagtgcaaggtgaagaagctgaagaaatacgaactggaatatctggccaagaaggaggaaaacgagcgcaaagaacgggaactgaagcagtacgagttgcgtttccacgaggaaaggagcaaactgcagcaggagattgtgacgttgaacgaaaaaatggaagccctcgcgaaggtggacaaaaagaacaacgggatcattggagactacaagcagataatacagcgacaagagaatgagaacaacaagcttcaccaaatgttggaggacttgacaaaaaccgtatccggctgttccaaatgttcgtccagtataccgaagtcttccccgttgcataaatcgtacggcaagaatctgcagaatgccaacaatgagaacaacaatgatcaaacttcgacccaaacggagagcaatctcggtccgctggatccgctgctgattgcgaaacagaggatattggaactggagcaggagttggcacaaaccaagctagcccaggtagaagcggagtgtaagaatcaggatctccatcatcagctcaccgcaactttgaccgagctgcagacaaatcgcagcagttggcagccatggttttccaaaacgctgaactccattcaggagaaggtggtaacgaggcgcgatgtcaacgctccgatggccacgttccaatcttacaccgattcaagtgtaaaacatcgtgaacattcccataccttgccggcgcagacacaactgcgcaacaagctgaaccaacgccacagtctgggccaggttggattcgaagcggcatgtggcgatgatctcgttcgtccgttgaaaaccggaagcagtggtgccgccggagatgccagaggcggatcagattcgtacctttttctaaactggtacaaacgacatagaacatcaaatccagcagaagtattttcaaagattcgagatttttcttccggtcggcaaagccaattgaacatcacactggtttccctggaagagatttaccatatcagcgaaagtgtctcccatgtcaagctatggtaaaacatcttcttctccttggcattgcgtcctcactaggacagaacctgcttctcagcttagtgttctaatgagtacattcatagttaataactgagagtatatcgtgtggcaggaacgatgatactctatgccccagggacgtcaaggaaatttccattacgaagagatcctggactgaccgggaatcgcattgctttgctttgtagccgcggactctaaccactcggctaaggaaggccccatggcaaaacatgctttttattatatcattatatatgtatataaaattggtgtgaatattggaataaaaataataaaacttgaatatgtagta

SEQ ID NO: 750 - DNA, 2591 bp, Aedes aegypti
gtatcgttttattcatatggttttaagtaaatgctcaaagactttactttgctaaaatctggctgagcatgagcaagtactccggtttattcatatgacctattgcataccgtcctgcctttcaaatcgatcaccctcgcaccgatggatcgcgttcacgcaaaccgttatcttttcgccgtccgtcaagcagctgagtcatcagctgatcgttgcgcctgtgttggttcctgcctgcctgacagctgtttgcactcggtcggtctttgtcgcactcgcagtccagtcgtcagtttcactctagcgttcactctttgcagtcgatcagtccgtcagtctgtcagtgtgtaaataaataacaagccttttgctcttttgcttctggtgcgcgacgaaaaaatctaataaaacgtagtttagtagctagtggtttattattagtgattctctcgttcaattatgcgcgtttagttttcgaaaacggatcaatcgcgtcacaaagagacgcgataaagtgaaaaacaatttgacgagacgggaaaaacattgtgcttgataggagaagggtagtttctgcttctccgaagtttaattgcaaggaaccacagtaaatcagctcgagcgcaataattttgcgcagtttcatcatcccgcgggcagtaaatggccatcagtctgatgtcggatggcggggctccggagaatttccacatttcctacaccaacgatgacgacgattccaatctgagcgctagcgctatgcgatgtcccctgtgcaactactcgaaacggcacttccattgcaaatcatgcatccggaagggggacttcatacactcaacccatcacatactggagagattctccgagaagcaactacgccacatgaatctgaagtccgcccatgccactttggaaggcaaatgcgtaaaactgttggaacgccggaggctcagctgccagctgcgagcggagataaagcagcggaccgagaacattgacaacattcgcaagctgatggccctgaagcgagagaacgtcgggcgcctgcaggctctgaggaaggaactttacgaatcgaatcgactactgcggatgaagcttccgcgttgcgacgaccaggtcaaacggattagctcctacgtgctctcgaagctggaggaaagcgaacggcgtagggctagtatcaatgagctgcaagatgaaataaagcagtttcgacgggatcagattgggaaattgattcgatacatctttcccatttcacgagctatcagtaaccggagtggtttctcgagcagtgacggagaaagcaagcatacgattagtgaaatctccgacgctacccggacggcatatgtccgaggaaaatgggtcctgcaggatagcttcggagagatccaacacattatcgtagctccggctttgccaggaaatgggaactattcggcgtacaacgactgggccacggtaaacccagcaacggacgtcagttccacgggaagaagcgaagacggcgttcgcaacgtggccagtagaaatcctgcgcacacaatcgctgctgcactgacctataccgcccagctagtgcacattgtatgcttctatctggacattcgtgcaccgtataaagtatcgtacagtgatttttgcacaacggctctctcggaggcacagttcaaccggaaggttgcgcgcctcaacgccaacattctgtatctctgctacacccagggctgccagttgaacgaattgcggcccacccatacgcttgagaacatccaaaggctgatgaactcgacccatgcggatttgggtcggttcggaccggtggacagaaacttctgtctcaatgaaccgaccgatgctgcgctgatacagcatctcggaatcggcgaagactcggattctgacggtaagactacttctcatggcgtgtatacggcaaaggttgattacaaaaaataggcatcgtcaaatctctcagtactcgaaaatatgggggtttatgcgatgtcgtttatttttgtgataatattgttctatcaggcacggcgtgacgtctgtgcactgttcaacaatcacgttacgcacgatcacacatgtttccctctttttagacgaatccaacatccaccaggagtgggaagcggtggcggtacctccggcggaagccaacatgcttttactgaccggaacggctggcggaaacccactgctctacggcaatactcatcattaccaaacgcagcaacagcagcatccttaccatcatcaccatcaccaccacaatcaaccggcgacgaccagtttgatgacgagtgcggtcgcttcggtcacgtccttctggaagggttggaccggtgggaaatgaacggtcctccgtgagacactgttcctctcggaacattgaagtgataggcgactggacatggacgttatggtgatgagaatcgatagcttacgaggacgaataaaaagtgattttcatttcttcacagttttagccgccaaaatataacttttatttttgtacaccgcatagattctaataaatttgcattatttgcattttctaatattcaaagcaa

SEQ ID NO: 751 - DNA, 1626 bp, Aedes aegypti
atgtatctcacgagcaaaaggttggacgtgaaactgttcctatggggcctgtttctgctgcagatattcctgatatcagtcttcctggcgttcgggtccctgctggccgccagcagctcgatccagcaggatgaccaatcgtccggggctcggaaccgttcgcagtcccggtcaacggcctggttcgacgtgaaattcgtcaacaatcagagctcttccgaatctccgtcgcaaacggcggccatcgagggacggcagaaagtggtgggcggaggacatatcagacacccacggttccggccgcttcagctgaagacagtcgccaagccggacgattacaccaagtattataggcccatccactatcacgatggctaccgagagcacactcatctgtgctttatcgagggaacccatttcccgaccgcgaaaccaaaaaagaaaacacctcccacggcaccgggacggcaacccgtgggacctatcaccaatgagactgacttcgaagcaggagagttagatgtagtagtagtaacagaaggaacggaagacgaggaagataatgacatggacaatgaagtcctagtggacgggcgctgtcgctgtcggccggaatggcacggtccggattgtggcctgccggaagtgctctggcgtgcgttcattgcctctcgtatcccaccgaggaatcaaacggcagcaccgcggaaggtgccgaagaatgtgttctacattatcgacgccaacttcatcagtgtggaactgctggagattcagatcatggaactgctggatgtggtgagtttgttcgtgctgtgcgatcggcaactgccggtcgccgatggagtgaagagtgagacctatacaataggaccgcatgtgatgagtactgattttttgaaggcaaacctagacaagattctcctgttggaggatccgacgtgtagcggaaggaacgtttttcggaaaatgaaaaagtttgtccgcaaaagtgatatgcatgtggaagacgtgctgctgtacagccaaacggatgaaattctgaatcgaagggcagtgaactacttccggtggtacgacaactggccgcatccggtacggttccgactgaagtataccgtctttggcttcttctggcagcatccgaagagcaccttcatcggaggggccgcctgtcaattaagtactgtggacgaagctttccgatccgacccggaagccctgctaaggatcgaaaagccggtgatgctaattggtgatctgaatcattatggcggttggtactgccgacactgctaccaactgatagatatagtaaaatatttagagtttataaccttagtcaatactaatactagcgctagcatcattagagccaaccaatcgtcatcgtatcttcccgatccgaaaaagagtaccgttatgaatgtggaatacattcagaatctcattgccagcggaaagtatttcgatgacaaaaccattctcactaagctacagcgccacgtggacaagtactacgcgccagagtatgtgcacaaaaacagctggcggttcgataacatcgtcatcaatctgtttgcccgctgggaagatagcgtcatcgatgacgagtactttagttag

SEQ ID NO: 752 - DNA, 1778 bp, Aedes aegypti
tgaagatcagcctgccgtaagtgagtgagtgtttagatttcaataatggcaacgaagaaaatcggtttataacttttttttctgcttcccaaagcggaaaattcccggcttgcgtctttttacgtaaaaagtagtgccccgcgaagacgcagcaagtgttattccaagcgttctgcatttactttgttagataagattttcatttgcgcaaacagtgaatttgtggatatttggcgaaattttcaagtgcggcattagcatctacctgagcgatacagtaaccaaatctacatagcaaaatgcgtctatttccggtgcggatgtccaacatcaataagatgttggatttctattcccagttcaacccttcacctttaagtatcaaacagttcatagactttggtctcaatgcatgtcccacgaagtcgtacatatttctacgtaaggagttaccagtcagattggccaacataatgaaggaaatcacacttttaccagaaggtctgctaaggatgccttcggtgggtttggtcagtgcatggtacgtgaaaagttttgaggaagtccttgagtttgagaaaacagaacccactggtgacaatctagacaaattctgcaaatctctcatacaaatccgtgaccggcattcagatgtcgtgcaaaccatggcgcagggaattctagagctgaaagaatcgcgaaatggacaaatcgaaccatcgaccgagctctcaatgcagtacttcctagaccggctgtacatgtcacgtattagcattcgaatgctaatcaaccaacacacgattttattcggagagattccgcaatcaggcagacatgttggatgtattgatccattgtgtgatccgcacatggtcgttcgagacgcttacgagaatgcacgctttctatgtgaccaatactatcttgctagtcctgaattagaagtgatagaacacaacgatctggaaaagggtaaacctatcaaaatagtgtacgtaccttctcacctgtatcatatgctcttcgagctattcaaaaactcaatgcgtgccgtaatggaataccatggtgccgaagatgatattccacccatcaaggtcaccattgtcaagggcaaagaggacatctgcgtcaaaatgtctgaccgtggcggtggcattcccagatcccatgtcgatcaactgttcaagtacatgtacagcacagcaccgcaaccgccaaaatcaaagtccgacctcccgcttgtccccttggccggttatggctacggtttacctatttcgaggctgtatgcacgctatttccatggagatttggtactatactcatgtgaaggatacgggtctgatgctgtgatatatttgaaggcactttctgacgaggcaaacgagctgttgccaatcttcaacaagaccagctctcgtttttacaaggccaccgtgccaaccggagattggtcaaatcagaactcggatatgaactctaagcagatgaacgcccaaaccagacgcaacacgacagtatccaattgaattcaactgagtgtgcttcacagtcatcgtttttttatatattcaccaaaaatgtctcatgattacataacacacctatgttattcagcaagtagttttttgactagcaaatcaatgttgctcttatcatggtgattagtgggttacagatctaataaaaaaatatcatatcaccataagcatctctgttataaactactatggccaataaacgcaactatggattcgttatataatatagag

SEQ ID NO: 753 - DNA, 2150 bp, Aedes aegypti
aatatcccagtcgtcggtggaggagacgataatgtgtttgcggtgcttaatccaatatttatgcctgtgcaaaaattgcggctgcggcatttggcctacttctgcagactgatgttgaggcaagcttgtgctctaaatgcaattactctttactactttgaatttcgccaagctctggaagcatccacgaccgcttcgcagatcgagctggaagccgaagaggagcccacgatcgagctgccaccgcccatgaaaccgatccaggatacaaccacgacgttgtctggtaccccgtctattggtgaggggggtagtagtagtagtatgggcggaatcggtcctggagggctggacgattctaccattggggtgccatcagttagtaacggagggggaggtagcagttgtgcagctagttcaatcggtggaagcggggctgccctgattaaagcgcccacatcgccacagtattttgaggttgagaatctggacgagaacttagctgacgagcagggtatcgatgatattctccggaagcggatgtttgctctgaaagaactcgtaaccacggaggaggcatacgtaaacgacctgtcgcagatagtcaatggctacattgccgagattcgaaatcccagcagcagtgtgccaatcccagatgacctaaagggtggcaaggagcggatggtgttcggcaatatagaagcaatctacgagtggcatcgagaccactttttgaaatcgctacaaaagtgtcagctaaacccgcacgagctgggaccgctaataaagcgaagcgaacggaagctgcacatgtatgtcgtgtattgccagaacaagccggtgtcggaacacatcgtgcaggagcatatgagttacttcgatgaattacgcttaaaattaaaatataaattatgtttaggagatatgctcattaaacctgtccaaagaattatgaagtacgagttactgttgaaagatatcctgaagcatactcagcgggccggtctcaccgaggaaattccaggattgaaagatgcaatgcatataatgcgagtagttcctaaggcagccaacgacatgatggatgtcggtcggttgcagaaatttgagggtaagataacggcacagggcaagctgctgctgcacggtccgctttactgtgtcgaaggtgccagtagtagcgataagaattcgtataacgcccagaagccgaaagaactgcacgtgttcctgtttgagcagaacatcatctttgcggaaatcgttggcaagaagacgcagttcacgagccctagctacatctacaaggcacacatacaggtgaacaaaatgaccctgcaggacttatccgaccaaaccaatggaaatcggttctcgctttgctcaatcgatccgcagcgctccagtctcagctttatctgcacagcgccaacgatcgagctgcacaacgagtggctcaacacaattcgcaacattttgcagacgcagaatgactttctaaaagcaatacaaagtcctatcgcctaccagaaggaactaacaaaggactcataaataccaaccaacaaaacaaccaaactgtaacaagcaaaacatacacaatcatgctgtaggaagcgtgatgactttaaaaagcgaagcgaaaagcatctgtttacaatcaacattcggcgaaccatggggaaggaacgcaaaccatctaggacgacgacccgggtgaacggtaaggtacacgagtttcaaacggtttgattttatactaaagctcccagccgccgcatcgttcgaagcagtgatgacaccagccagcagcggatataggctcacattttaaacccaatgtgagggattgacatcaaattttaagaacaacaacctacaaatcttaggtaagccacaaagtatgaacaatttgtaattaaagtaaattattatacagaaaacgagtatgacaaacatcaatatacagacaaaaaagtgatgatcaaaaagtaaatcattgaacaatgagaacccttaccaaaaaataatggtttgtgaaaatcgcgcacgtggagcgtttaatatggataacataacataaaacaaattctacatttatattgcattcatgagtaaaacagcgagaaattacaaaactgcagccg

SEQ ID NO: 754 - DNA, 4413 bp, Aedes aegypti
atgaagcagatcaatctggaggacactccactgacgatggcggcgatcgtgcgccgtcgggcggaagccatcaagcacaacagcgagtgcgaaacggacgaccagcgacacaatcaaacgtttccgccactcggtacgggtaccatcgcggcatcggactcgggagtgttcatgtctacctcggatatcgaccggacgcatagtgcgagcaccagcacgcaacacctgagtgccgtcgaagaatacacggaaggtcaaacggcaccgaccaagtccagttacgtaatcggcgaacaggacgaagatgaagacgaatgtcaagtggacgacgaaggcgacgaggacgagggagaagaggaggacgtcatcgaactggatcaatcacacgagagcaagactgataggaaattgagtaaacgagcttgccagagtctaccggacgtgaacagtcctcggccaaacgctttgaaagctaaaggaaccacctgtgatagtagtagtgatatacacgtagcacctaagaaggatgagattgagctgcgggcctcgtcggatgctgccaaaccctgcgatacggggggccacggcaagcaagcgacggccccggtagcgccggctctggccacttcccagcgaaagcccgtcgatccgagcctgctgcaggcgttctccatcgatccgaagctgatcaacaagttcgacgggctcgagcacacgctgtactacatcgacgagaacggcagcccgaagctgcgggacaagttctcggtccagcagcagctggcggacgagaagaagcgccggaagaaggcgaagaagctggagaagtacggcccggacggggaggacgatatggcccagtgtacctgctttagctttagtaggctatcgaaaaagttccgggatatgtgtaaagatggttcaaaagtgacaacggttgtggcaacagccggccagggaccagacagaccacaggaagtatcatacacagataccaaggtgatcggcaatggaagcttcggcgttgtcttccaggcgacgctctgtgatacgggcgagctagtcgcaattaagaaggtgttacaggacaaaagatttaagaaccgcgaactacaaattatgcgacggctagaacactgtaatattgttaaactaaaatatttcttttactccagcggcgataagaaagacgaagtttatctcaacctagtgctcgaatatattccagaaaccgtatacaaagtggcacgttattatgctaaaaacaaacaaacgataccaatcaattttatcaggctctatatgtaccagctgttccggagtctcgcctacatccactcgctcggtatctgccatcgtgacatcaaaccccagaacctgctgctagacccggagacggccgtactgaagctgtgcgactttggcagtgccaaacagttgctgcatggggagccgaacgtgtcgtacatctgctcgcgatactaccgggcaccggagttgatatttggtgccataaactataccacaaagatcgacgtctggagtgcgggatgcgtactagccgaattactccttggacagcccatcttccccggcgactccggcgtcgaccagttggtagaaatcatcaaggtcctcggcactccaacccgggaacagatcaaggaaatgaaccccaactatacggaattcaaattcccccagatcaaaagtcatccatggcagaaggtattccgagcgcgtaccccaccagatgcgatcgcactggtgtcccggttgctagagtacacgccgggatccagaataacgccgatccaagcatgtgcgcatccattcttcaacgagctacgagagggcaacaagacactaccgaacggacgcgagtttccgccactgttcaacttcacagagcaagagctagcgattcaaccaaacctaaatctgatactgaggccccggaacccgaacgacgcgaaagccggtcaatcgtccagctcgacggacggtggcaacagtggcagcggcggaaacggtgccggagccaacagcagcacagtggccggtagcaacagcagcaacaatagcggcacaggtaacggtggcagtagcaatagtggcgtcgcgcccgacagcacccaggggcaggggggcggcgccagcggtagcagccagggggtgggagctggggcgcagtccgtcggcggtgcggaggatattacgtcatcacagtccgtacccggcgtcgacagtagttccagtcaaggagctatagcgtcagcggcaacttctacgatgggttagctttaattcttacacataaaatattatattatatattttttttaattttaaaattattaatttaatgcgaggatggaaataaaaaaacagaagaacccacggcaagagatggaaaataaggcaaaatcgtgaaacaaaagttaataaaattactagcaaggtaaaaaccacaattcagcaaaaaaacagaattacatattaatacacatagacgaattaattaatattgaaacacccacacagaagaaaaaggaacaacaatactaatcgagcagcaccttgcgcatagccggaatacgcgcaaggttctaaatcaagtaaatcacaaatttaccttcaacgagaaaagataaattctgagagtaataaatatttcaaatcaatattattctaactaatgaacaatttaaaacacacccacacaaacacaaaaacacacatacactctcacacaccaaactactagaggatcaaaagtcagtcaccgtaagtaaaaaaaaagaaacacagacttatacgttctgaatgaaaaaagtagtttcaattcgctagttatagttattgaaaaagagcaagtttagtttttcgttctcttgtgactgttgtgcaaactgaaaaaaaaataattataatcgtaagccgactaaaaaatatatccaaaattgtcaacaaaaacggatacggaaccgttttgcatgtgagagctataaattcgtgtccgccaagccgcgctaagagtcttctattgaagcggagacccgtgcggcaacgcgatggtgtatatgttgcttttgtttctgctttcggttagtcctcttttctttaatcggttcttcgtttgtttatctgtttctttttttgtgtcgttttacccccggcacccacagcatagatgctcgggcaaggctggagaatctagtttcttcttttatttaagtcaactttgaggaaagggaagtgtataatgttgcataaaataatgaagtaaataaaaaaaatcaaagtgttatacccccgaaactaagcaagaagcaaaacatattcgttagaaattgtgcgcgaagcgcgtgcgatttttttaagaaaagtgaaaattgtgtacgtgcatcgatttctattatttcattaaataaataaaaaacgggaaaattgatgaaagcgagtcgagcgttgtacgtatatatcttgtgtagtagtgtgaaaaaattgtttatattactattaacgaagtaaaggaaatttagctactagaaggatacacactcacactcgtagaaaatggaagaaaaaatacacaagtaccactaaaattacaagtacagatagcagacttgagagagagcgagcgagcattgtaaaatggtgaggcaagcagcaggagaacatagcaagaaaataaatacaaaccagcattattcaaacttcttctaatctttgcaaatttgtcaactgatccacacagaacaaaaaaaaaacagtctctccaatcagctgtgtctactagtgaatgaactctacgccagagacaagcataattataataatcaaacaataaattattttaaataaaaggaaatacagagaaatcaatgaaaaaaaacaaatggaaaaacctgtttttgtagcataaagaaagtatatatatattaatgcataagtaatttaaatttgaatctaaaagaagcacagagaaaagaaacaaaaaaaaaacaacaaggaatgtagatcttcacttatgattgaacatactgcggaaaagaatcgagtgcgcacttgtttgcgagaaccttgtggtgaagagaaaaaggaactagccgaaaaatgtaattagcgtaaaaacacacacagtacccaattggaaaatatcgttgtcgccctagagcaagtaacacagtaaaggaaaaaacaacagaaacaaaccaacacccgcatactttcactgttggattaggtgaaagaagtaatattgaaaacagcaacaacaacaaaagaaaaaaaaacaacacacacatagtaactgctacaatttttagctattagatattttaatcagctagaaaaaaagtaaataaaggaaaaaatgttaagagatttcgctgtcatctatgatat

SEQ ID NO: 755 - DNA, 2128 bp, Aedes aegypti
aagttgtaacaagtttaataaatgtacaatttgtagttgcttgattccttcatggacaaaaataaccgaaattgcataggaaatcaatagatgtaccttggtagcttggcagtctgtcatcttcaatgtcaatttgttactagagatcgagtatctatacctctgcatttccattgttatcacaggaagttttttaaggggggggggagagtccaaagctttatggtctggattcaccttatataggtgatgagatttgtgcaacctcaatataaaaagtcatttttcctttatggaaagcatcaagtataaactgtttaacccacattgttgtttcttaactcgtacctaccattcattgagggaatatttgtttaatgatgattgcccgtctcttatatactggtcctgccaggtgaactcataaacctaacctaccaatagttacagctcaatttcatcatatcctttttcccacttttctcttttcctttccaggcatcaaatgtccagtgtgcagcaagtttgtcatgcccgacgacatagagtgtcatttagtaatgtgcctaacgaaacctcgtttgtcttacaatgaggactgcttaacggatgccaagggtgaatgtgttatatgcttagaagatttatgtcccggtgatatcattgctagattaccatgcttatgcatctatcataaaggatgtatcgacaaatggttcgaggtgaatcgcagctgtccggaacatccgggtgactagtgaagctaattcggtacgcgtcacgttcggtttcctgtttcgtttttgtactagttatagcggagcaatccggcaggtaggaacgggtcatccgagccaggacgtggcaacgaggggctcacgcacgggggacgggacgagtctacactagtggttagtagtaatagttgtagtagtaattaaacaattgaaacacactgcaagagagatcgagcaactgtggagtgatgacggtgatggacgtcgcgaggagggtgtgcacgagagggggttacgatttgctgggcaaatcgagaccctcgggaaagtggaatcgtcagctagcagcatcgaggccaccaacgcggcccagaccggagagatgattgtaccaggacggacgatttcgcttgttttatagtgaacgtttattacctgatttaaatatataccgaaggcaaacagacacgcaatataatcttcacctggaagccacctaggtgcaaaggtggccacgacgaaaaggacagcataactgggcaagcttttttactgcaataaatcgataagtagatgcaaacgtaaactaagctcacgttttggagagttgaatttgttttttttctgcgtgtaaagccaacattagaatctaccaaaaaaaaaatcaaccggaagaagagaatacgcgcgattaaactaaaatagctaatatcaaaacgaacctgtaggcatctatttaggcaaattatacttttaaccaactctatccgaggattaccttttgaacgtttcaccaatcgaacaacaaatggttttaattttctattctcctaccgctcttgactgtcgattgttagctgacgttagtgtgagagcataaaaacgaatcatatatatactaataattaaaatgtggaagaatgcagtgttgctcgcgaaacacatcgctttgtaaatattaaagaataagcaaacggaagcaagagacgacgttgaaaaactagatctaaataaaaaaaacaaatctaactgattaaaaatagtgatccaaacaaagaaaacagaacaaaaaatgacagatttgattaacgcgaaagaagaggaagagatcataacgataactgtaagtgaaattatgtagtgatcttattatgattgacaacaaacagactaaaaacaaaaggaagatcgagagaatactgttaacaatccgctacagtcttaaacacatacaaacacacacaaccacacacagatacacagaaacgaaacaaaacaaatagaaacaataactacattaaaacaatttattaacggcaacagtatgttatgtgtatgaagcaaaaaaataatacaataaacagagcaattttctcaatattttcaatttc

SEQ ID NO: 756 - DNA, 915 bp, Aedes aegypti
atggctgaccagcaggcacaaaaggaagtgattgctaccaaggttaccggtgtggtaaaatggttcaatgtaaagagcggttatggtttcatcaatcgtggcgatacgcaagaagatgtcttcgttcatcagtcagctatcgcacgtaacaaccccaaaaaagccgtccgttctgtcggtgatggtgaagtggttgaatttgacgttgtcatcggagaaaagggtaacgaggcagccaacgtaaccggtccccagggtgaaccggtgaagggaagtccatatgccgccgaaaaacgtcgtggataccgacagtggtggcagaagcgtggccaacgccgaccacactccaaggacggcgaaccactggaggaacacaatgaaatggaagggcaaaatggtgaaccccaacagcagcaacaacaacaacctccacagcatcagatgaagcagcaaccacttcaacagcgccgtggattccgtcctcgtggacgtggaggttatgcctactcgtatcgtccacctccgcgaggtccacgtcgtgatggtcccccaatgaacgacaatggacacatggaccaaaatcaaatgatggacggtcaaaacggacctcgtcaaggtggacgtggtggcggtggcccgagacgtttcttccgccgtaactatcacaacggtggacgaggtatgggtggccccggaggacccccacgacgaggtggatatcgtaacgattatcagaacgactaccaacagaacggaccggaacaacctcgccgtatgaacccagtacgcggtggcggcggtcgtggtcgcttcccgcgtcgaggtggacgaggtggtcagagacccaggaccgatgcaggagctggcggaaacaacaacgctgtccagaataccactaccgaaagctccgcataa

SEQ ID NO: 757 - DNA, 5562 bp, Aedes aegypti
cgtgtgtctgtaatgcgaggccaagtggtaacaccgcagggacttggtatcatcgggatccgagtatcagtggaccgtgattcaagatttggtttcactttaacacgacaaggcggatggtttgatgtcttggtaaacggaggtggcgccgtaacactgcaatttcaaagatcaccatttcgtccattaacacgcacagttttcgtcccatggaatcaggtaaatttgaattcatacagctttttaagtacgtctcagtatcgtttcctcgaagacaacccatcgcctgtgacaatttgtctcgaacatgatcacgaattacttagaccacagcttaccagtacttggatgcccaatggtgtagggtctgttccaggaaaaagtataatttttgctgaaacacagattatacaagaatctatacagattcccggttctgaccttcatctaacatatcaaacatcacaggcctccggatataaaagcatagtgcggatgcagttaacacacgacaaaattcctgaaactcttacccacgtacacattggcgtacagatagaagggtctctacatgtgaaaacatacgaagctgatcccaatttgagctacatttttgcatggaacaaaagaaatgtttacaaacaaaaagtgtacggaacggcagtagccagaatttctattggctatcagcattctacatgtaaagacataatatgggaaactcaaacggcaaaacttcagggttttgaggttgatatatctgacattggcgggtggggtttagatattcatcaccattataatttccatgaaggaatcttgcagaaaggagatggagctacattgcatatgaaagagtatcctagaattgttagacaagtaatgggagatggtcagcaacgccaactaagttgtaaagaatattgcaatggtttatctaagcatgccagactgctcactccagtagcacttactgcaggccccgatggaagtctttacgtaggagatttcaaccttgtacgacgcattaccacaaatggcagtgtgtttactgttcttgaactagaaacaactcaggttgcttatcaatattacctgagtgtgtcccctgcagatggacacctctatatttctgatccagagaaacataaaatcttgagagttgtgcaactcgaaaatgtacccgaccccgcggcaaacagtgatgtagtagttggaagtggccagcgctgtattcctggagacgaggaaaattgtggcgatggaggaccggccaagcaagcacgattatcacacccaaaaggaatagctatagctgctgataaaaccatgtatattgcggatggaactaatataagggctgttgatcctaaagggattattcatacccttattggacatcacggacatcacaaccattggagtccagcgccatgccggggagctttgcttgccaccagagcccaattacaatggcccactggccttgctctcaatcctcttgacggttcgctgcacttcatagatgatcgactagtattgaaactaacagccgacatgaaaataaaagttgtggctggcgttcctttgcattgtaatagcaatgaagagcataacaaaacaaattctgatgatgttcttggtacggtagtggctatggcttttgcaccttttggagatctatacattgcagacaccgattcgaggcgaataaactctatacgggttgttgattctactggttatatgcgcactttcgctggcagatcggaaaatggaatgaaggaagacatgtctgcaatgcaatcggaaaccattttatcttccaatgtgagattccaagcagtatcagccattgcgattgcacaagatggagtcatcaacatagcagatcaaggttcgcttcgaattgttgcacttcagcattatttgccacaacatgacacaaacggagagtttcaaataccttacacaccgacaaacgaaatgtatgttttcaatcgttatggccaacacgtcgctacaaaggatttatcttctggcaaaactcggtattcatttctgtactcaaaaaataccagttttggaaagctatcgaccgttaccgacagctcaggcaataaaatacaattcttgcgagattacagtaacgtggtgagttcaattgagaattcgcaagaccataagtcggagttgaaaatttcatcaaacggaatgctgacaaaaataattgaacgaaaaggaaaatctgaacttcaattcgattacgatagtaataatggtttgcttctgagccgaacaggaaatggagaaacattcatctatcagtacgacgaatacggacgcgtaacaaaagccattttaccaagtggtgaagcattcctaatcacaacagtattgggagagaaatcctatgatttaggagtacaaattaacgaaagcatttattcgcactttgctcaggagccggcgacgccaacagtattttctttgaccatgactaatgccaaaatcagtcatgctaacagcactctaacgattatgcgaagtgatgggatcgttattgaatcatccgcggtagctgcccacccgtacttggagaaaataatgccaattgaggcggaaatgttaccaatgtggtctcaccaaactgttaaaatgggtgaaaacctcatcaatacgatgtattctaagtatgactacaaaggcaatgaaaataatcgtttgccacaacaaagactcagtcatgaaatttttgtaaataatagccgagcaatccgaattgactacgagcagttgcagaatagagaaacattttataacaaatacgacgaaattattttaacagtattatacgatcaatctggtttacccatttcctattacccaggcggagaagacagcaaattccatccacttaacataacatacgaccgtttcaatcgtgtagaaggatggcaatggggaccagcagaaatgaaatataattatgatatgaatgggttactatcagaagtaacaagccaacaagatggcatcatattgtattcatacaacgaattgaatttgttgtcggaaatttcactaggaagtcaacgtaaatttaaactttcatacgatgcaaacggtggactacgtcacatcacactcccgagtggtacaaaacattccttcagtatgcaaccatccatcggtttcataagattcacatataccccgcctggtaacaataaaccttaccttcaacactattcctattctggcgcactattgcaaacaatatatcccggtgatggagcacgcgtagtttatcgatacagcgctgctaatctagtatcagaaatcatccacggagacggccacagtgagttcagttatgcagcgagttccagtatgccttcggcagtcgttcatacagaacgagatttagaatatcgttgggattttgactacgttggaggtctgcttatggaagaaagaatcgatttctcggctaaaacaggattatcgaatgctaagtttagttacgaatatgataactatttccgtttgatatctattcaaggaaggatcggtggacaaaatcttcagaatcaaattctggagtatagtgataaaactggcggtttatctcagataggacaatttaaggtgtccaatccaaccgctaatcaaactactgttggagatggtactgctacgttttctcgtacgattaatggtcgattcttggaaacgttaattacggtaatgatccatcgaatggcagtattccgaatggaatttgtgcacgatatgcacggaaggatttcccaaacacgtacatacactcgcaatgtgggggtcaatacatataccaacgtgaaaaactacacttgggactgcgatggccaactgattggcgtagaagcacaagagccctggggattccgatatgatgataacggaaacatgctttcattgacttacagaggaaacacaatcccaatggagtacagtagtacagatcgaattttgaagttcggggaaggtccatacaaatatgaagcacgtggtttggtagcacaaaatgcccgtgaagaacgcttccactacaatacacaaggacttcttataagagctactaagagaggacgttttgatgtgcgttactattatgatcatctaaatcggctgattaccagaaaagataattttgggaacgtcactcaattcttctacaataaccaagaccgtatgaatgaagttagccaaatctattctccacgagatggtaagctaatgtcacttacctacgacgatcgtggacatttaatatttgctcaggtgtatcgtcataagtactacatagcaacggatcaatgcggcacgccagtaatgatgttcaatcaatacggggaaggaattcgagaaattatgcgatcaccctacggacatatcgtttatgattcgaacccttatttgtacatgccgatcgatttttgtggaggagtattagatcaggttacatctcttgttcatatgcccgacggaaaagtatacgatcctttaataggacaatggatgacccccaattgggaaaatgttgacgaacgcattaacaacccaacccgactgcatctttatcgctacaatggaaacgatcctatcaaccgagatcatacacggaatcaccccaataaccaattggaatggttgaaattattaggatacaatatccagagtttgatcccacaaaccaatgatcgtctctacacgcaaaataatccatggagaaaaacgcaaacatctctcctaacaccacaaataatgcaacaatctgggtttttgtcatatctcgcaacacggaaaatgaaaacagcttatgatctaactagttcacctaaatcatcactgaaatcgaatgcaatggacataaggccacatagaatcggtgctgcatccgatccgccatttggtaaaggcattattgtgtcgcgttctcttgaaggccaggcgattgtatctagtgttccagctgctaatccaatatatcgtgatgtctatacatctgtcttcaatagaactcgcttattaccgttcacatttgttgtgcataactcccttcaagatgccttctttttcgtaaaagaagattcgtggcgatcgacagaagatcgtcaacagcttaaacggctgcagggacaagtcaacactacattccatgaaggatcgcgtgagaatggtagtggaaacaatcaattggatgtcaagctacacattcaaaatgccataattaatcttaagtatggcactactgccgaaaaagaacatcaaagacttatgcatcatgcaaaacttcaagccgtcaggaaagcttggcatcgcgaaaaggagcttcttcgtgttgggcttattagtagctacgattggacacaacaggaaactgatgatattattaaaaatggttatgctaatctctacgaaggcgaatacatccatgatattattgagtatccagaaatgctcgaagatcctttcaatataagatttgtgaaaaagaaaattaaccaaacacgaaaa

SEQ ID NO: 758 - DNA, 2604 bp, Aedes aegypti
gagggcatcgattccgactctttcgatagcgatgaaagtgacgaagatcgccgaaacgacacctacgtacactcaaacgatatcaacagcgccaaacagctgccagatccgccaccctccaacaaccagatgtacgccttgatgcagaaaattcgcaacatcgggacgctctccaagtcggaactcgccaaaggattcaacaagttttccaaaaagaaaattagctcctccaagtcgccaaagatcttcaccggtgaaaatctaacctacccgtccggtccggatgataataatgcagctagctacgaaaacactccgctcccgaaaactcccaaacacaacagcgactccagcaatgtctcaaccttccgcaaaaagtccaaaaccggcaaatctctgcgctccaagcttcgcaagagcctccaatcggactctagtctcaacatccacagttcgttcaacgcctcccgcagtacgttctacgtaacggactcgctggacgtcgactctggcattttcaacggcagtgaacccaacagttcgtcctcgaatctgaacgtagcctccgtggggaaggacacggcctctcctctgaagcttgccccgcacaaaactcccgatgccgatcgacggaagtccatgaacggtggaagcccagctagtcgacccactattccaccaccaccgccacccatcagcgcacccatcggggacaaaaagtttctaaagaaccgaaagctgggcgctacttcgtggtacgccgaatgcggagttttcaaagcggatagcctaaagcaggcctcgttcgaaaacgaactcaagaacaaggagcgcagtacgacgtcctggtacgctgaagctgggctgtatcaaaccagtgatgtttccgtggcaagctctagcgaaagttccggggtgtcgaccggaggcgaaggcggcggagaggacgaccactcgcacagcatgttcgtcaacgagccgctctatcagatctacaacgcggccaagctggaatcgttgacgcgggatatcgacgcggagattactggcgacggagacaccgagcttggtgctggttccggcagcgatgaggacgttgtgggccggaaattgcgccccagtgcgttcgagctgatcgaaccgaacgtgggcaagctgcggactctctggtgcgagattccggaggtgatcaactcggagatattgctgaccctaactccaacggagaaacgcctccaggaggccaagttcgagatcctcacgtcagaagcctcctacctgaaatcgctcaacttgctcaaaacccacttcatcaaccatccggccttccgggacgtcaaggtgctaacgtcctccgagcgcaagacgctcttctccaacatcattcccgtgcaagagtgctccgatcggttactctgcgatctggaaaactgctggcaggacaacatcatgctcctgggcctcagccacagcatctacaagcacgccgagaaacacttccacgtgtacgttaactattgcgagcaccaggcgaagatcgatcgcaccctaaagaacctcaaagcgaacaaaaccgagttcaccaaaacgttgctggagctggaatcggacccgatttgctgtggcctcagtctatcatccttcctgatgcttcccatgcagcggataacacggatgcgcctcctgctggacgctgtccttcaacgactcaaatcggacgacgacgaattcatcagctgggaaaagaccttcgtactgatcaaccagatcctgaaacagtgcaatgatgcggcccatcgaagcgagcagatgtacgagatggagatgatttcgcggcagattgaattcccgtcgcacatccggccactcgctatcgtcccttgcggaatcggtcccccaggcagcgtgatgcgtaagctggagaagaagggcgaactggtgcacttgctgtggcgcggtgacgacgccaagctcaccttcggcaagaagttcagcaaaagcagcatctacgcgtttctgttcaccgatctgattgtgctgaccaagaagaagggcgacgaaacctacctagtcacggactactgtccacgtgccctgttgacggtcaactccggagacattgtgcctcagctgccgaccaaggagatgcaagccatcgggaagcacctgatcatcatgacgctgctggagaaccacgagggaaaaactatcgaaatgatcatcagctgtccatcggaaacggaacgcgagcgttggctcaaggtgaccgaacccttgtcttcggaaaatcccgacgaaaaaatctacgagcagtgggactgccctcaggtggtggccatccatccctaccaggccctacaaccggacgaactggatctggacatcacggaagtggtcaacgtgcaccgcaaaatggcggacggctggtacgaaggcgagcggatccgggatggggccgtcgggtggttccccagcaactacaccaaggagatcccgtcggcacatgtccgcgccaagcacatcaagcagcgccacgtgctcctatcgtacacgtccaaatatatcgacacgacgacgcgaacgctgcagcacagcaaaaagtga

SEQ ID NO: 759 - DNA, 2280 bp, Aedes aegypti
atgagcggtatcggaaacgctcaaggcactaatgttggcttctccaccatatcggagttttatgatcagtccagcgtgagcagtagcagcaccatcaaactagagtccgtttctcccagtccgtcctccagcagcacatccatgatggacgcactgagtaacaatccgatcctgaccacggcttccgtacccattccttctcggcatgcaaaccaacggatgattaccgatccgacagactacttcatcgaaatcgaccaatctcagtcaccccatatgctgcaggatatcagctttataaccacatccgccaattccaatcttagtgcttcgactccagtggacacaatttttactcttcagaatattacggacgctggtctcgtaggtgaaggaatccaaattggcacaattaacatcaacgggtttgcaaacccggaaacatggaatgtggattcattcggacagattatctcaccctcgtcaacggtctcttccgcggcaaacgcacttggtcagcaaggtcaatttcacatggatgaagacgatatctatcagctcgataaggacgagctcattggtgatccaacgctaggcgatatctttgcccatgatctactgcatgaggacttgatgctgttgaatcctcctctgagtcaaccatcgccgaacctcagcgccgacagtggcagtggcagtgcaatacatctctcacctagtttaccacagcaaattcttcggtccaatccaaattcaaatgctaacaacaacatgataatgatgattggaaccaacatgcaacaaactaacgacttacacgttccaaatatgggcgaactctacgatgaacaaactcgaatttcaacttctccttacgctaccaataccaacatcagttcgcctgcaactttctctcctggtagccacagttccagtccttcgctggggtattctcaagcgcaaacccctccactccaaaaccggctccatcagcagctacaaatgaatgctatgaataacaacaatcgtttgctgaagatggaccatactgacaagactaagaatcaaaatgtgacgaacaacaatttcagcagaaacactggcaacgttggccaggtgcagtacaacccgaagtactccacattgcagcagctgctgatgacgaatacggctgacaggagtggaatgatgcttggacaatcggtgcctggaaactcttccgtgctgatgagtggtgcttccctgagcccgggcagtttcagcggacgtaggatgctgcatcacatgcatgcccaagccggttctagtcactcgggcattggtggtgctggcagtggtggcggcacgagcggtggtaccatgtcacggctgtcctcttcggcaccgacccacatgggaatggacgtattgatgtggcaacgtcgggagccacggccccatttgctgtccaccggaagcttggcggaagctggatcgacttcgtcgcttagcaccggaagcgttctcagtccggaggcgccggacttttcgcacgatgaaggatattctgacgacagcgatcattacgaggacttttccagcggtgacgagggatctgacacagaggatatgggacaagcatcaggcggtggtccaagcagctccaaggcgaagcgatacttctggcagtacaacgtacaggccaagggtccgaaaggtcagcggctggtcatcaagacccacaccgaggatccgcacttcctgaacgaggtcaccgatccggtcttcagcccgaattgctccgtacgcggcataaagcacagtggaaaggcacgcaaaggtgacggcaacgatctgacgcccaatccgaaaaagctgcacagcatcggcaaggagttggacaaactgggccgggtgatcaacgacatgactccggtcagcgagcttccgttcaacgcacgaccgaagacaaggaaggagaagaacaagttggcttccagggcttgccgcttgaagaagaaggctcagcacgaagccaacaagatcaaactatacggactggaaacagaacataagcgtttgatgaatggcatcaagcagatgaagcaaatacttgtgaccaaatgcagtcaggttccctcagagcccacagaggatcagaagcaaaatatggaaacgctagtcagctctgcaacaaagctgaaaattgccggaaactctacggaattcgtcaacagaatattagatgttatcaaagctggtaatagcgtcaatatcgacaaagtgctggaagaattctaa

SEQ ID NO: 760 - DNA, 2903 bp, Aedes aegypti
atgaagtgcatcaaattgaatttaccgtaccaaaccgctgcgctgctgaatgtaacgggcatctcgcaaaagtggaacaaactccgccgccgctgtgcatcgttcaaaacagtctcaggcccagcgtcactcgattcggacaccaactttattctggccgaacatccagcccattatcagatcatagcggcaggtccagttccagttcaagttcaacagcaacatcagccccaccatcatcatcaccaccatggtcatcatcgacatcatcatcatcaccacattcagcatgaccacgagcgacatctagctgatcaagcacatttcgcacatctccacgacccaaactgggaactccgacattccagctccagctcaacctccacatcttcctccacgattggacctcctccaatctatgctgctgaagagtactggcaaattcacgaacgagatgtcaaactgtggcggctcggtgctcatcaaacatacgcccataggatccgtgtgacccctaatcaacgacgcagtgcccacagcatcgactgggagtataacgtgcacaaatacgaaaatatggtcgaccacacccaagtgtcccctgctcgacttttccgacacgaaaagctccagtattacgacgaagtatccagtgttaagaagaaaaactccctcggtgctagtgaaagtgagagtggaataaaaattgccaaagagatcaagctgcctagtctgaaaaatttcaaatcagcttccatgcgactgccgggacagaagtcttccatcaatgaggtgcaacaactgcttagaagtaagttcaaccgaatacatgccggtcttcgcaaaaggcgggcactctccgtgcaagaagtgttccaaatgcccgcgcagaccaccccaacgaaacctaccttctacgttccatcaccgctggtcggtgaacgaaaacctcacaatccatcccgatacgaagaggagctcaacgaagacgaagatggccctcttagcttaccatacatcaacgaaaacctcctcaaagtggacgatgcccacgttaaactgcgagatcgatcactcagcccccgaaaagaacgcaccaagacttggtaccgcaacatcgacctcagcgcagttcgaaaattcgatcaaaacactccaaagcctaaaccatccgttcccgtcaccgaagacgaacaaccggaaacgcccaaagaaaaaccaaacttcgtgatcggaggtcgcgtgtcgctgcgcgaacgcgtcgaaaacatgaacctcaatcgacttcgatcgaaaacctccaccaccggcccatcgccaagtcctgtccccaggaagtccaacgagcagcgcaaaatccgtccccgtagccattccccgcttaaaaacctcaagatcaacctttccagcatcggaatcggaacgccaaccggtgaatcgacgcccaaacccaaacgggactcgtttggcctgtttggccgactgaaccgtatgatgcacggtagcagtccatcgccggaaaagtccaatcgtgtggcggccaaagatggcaccgccgtaaatggaaccagcagcccggtgcgttcgaaagccgacacaagcggaggtgctaacggttcggctgccaaggcggggtcttccgttagctacagcggtaatgttagtaaacagtccaccattcagaagctgacccaacttagcagcgggaatcgacgggactcggcggcgacggcggccaaggcggaaacgaacggcatcgaacgtgaccggaaatctaagcagatttccgacagctcacacaaaacgtccgtttcggtcaacggtctttcgaagccaacatcagtaacgtttatcaaggtaccggacacgcagcataatggaaccagtcccgacgataaagacgattatgacgatgaggaaatcgaagagagcaaattctgtactctgccacgaagtggccccaatgcatttacaattcggcaggcacgattcgtcaagggaaacggcgccaaagcgctagggttctcaatagtcggcggtaaggactcccccaaaggatcgatgggcatctacgtgaaaacgatctatcccaacggacaagcagcggagaagggaacacttcaggaaggcgacgaaatcctttcggtcaacggaactgcattccagggtttgtcccaccaggaggcgattaacgttttcaaatcgatcaaaactggcgacgtggtcattttgcttggcaggagaaacaaccgacgaaagttggacactccttcgccgcagtgaagcggcttttcgcggtgtaaaaatgcttagtggaatgtttattttttaccaaataaggatttctaataacatttgcaattattagcttagtaagaaccatacgcacagtttgaattgaatcgaaaatcacaacggaaagtgcacaattgctgtaacactcctgaccacgtagaaatcacggcagctcgaaccaaatgaaaaattcaaacaatttaccttttacttaccagtttgtttgatgttattttttattatgaaacaatgtcgaatcaacgcgcagacataactagtccaagattctttaaataaaatgtgtaaaaatttgacgaatccaaaccaagctttcatttgagcgagacagaaaaaataccaatatattcattaaaatacagttagtgtttaaccataccaaaggattgtcatcaaatgaaagaagtaaaatgcgtgcgattattagagaaaaacgctttttttgttagatacattgcttaattctgtccgggtaaagcacgcgagcgcgttcgtatttgtattaccgactttgaatttatttgcagttaattacaccacgttcttcgtgcatttaccagtaagtcatgcgaatataatatatgcagtat

SEQ ID NO: 761 - DNA, 3018 bp, Aedes aegypti
atggccgacgcattgaagttggccgacatgcaacgggccagtgtcgaatttgaacggcaacgccatttagccaactggctaatcgaatccagccctcacatgccgaaacccacgccccaacaacagaagcagctgcaacagcaacttggcaagaagggtaaattcaagcagaatccaatgttcttccttgcgaaaataggccacaatatgaacattgccagcagcaacaatccacccccacttggtaccaatttgataagcagcaattcgatagcgtctaccttcaactcgcaaaccaacctaccactggcaatcgtgtcatcttccggtcgggatggccacaagcctaaattaagacgattcaattcgcacgacaccagcgccaacatgttctcggtggcggagtttgaaaatgcccgcctagcgcgaagaaacgaaatcgagagcgccgccctgctaaggcaacggcaacgatataagctgaactccctttcatccggtggagactgctccacgggggaaagcaagggatccaaactcagcagcgaatcgacctcggaaccattgctggccgagcagttcctggagaagttttccctcccacgtgtggtacggctgtcgtacacctcggatggggccagcggaagcagttccggtgaccaaacgatgacctcgtctagttcagccgaatcatccagtacgtccgagaggaaaaagaagaagaaatctgccatttccagtccttccaacggagagctttttctactgtatcggcttatgcgtagcttcaaaatctaccacgtattcaacacaaagtcggggcataatcgcaaaaaaggatacaaaataccgcaggattatcccggatatttctcatttctcaatgagaaaggagctcaaacggctgtcatctacaccaccattgttcaactggtccgagagcgtgtatataaatttctttcgttggaaaacatctccgcctacaccgaatcccatgacaattttaaccacaaaacgcattacgttaaggcaactgctaaggcaggtcaggtgtaccgtttgctagccgttttccaggatggagatcacaagtcatcatctagtcagaaggactctgcatctgtgagcggaaatgttggtggtgcagagaaagaacgcggcaaatatgcccaattgctgggagacaaccgacagatatactacgtttcgttatcggccaaaggaaagttctacgaaattgaacagcacacggcgccagtgatgcaaaaaagcagcagcctcgggcatccaaacagtagcagcaaagcgccgaaacaactgaaccgggaatgcgtgcaccgaattgggttcatcatgcaatcggaggtcaatatgccattgaacctaaagctgatagccagtatgaacacaagttccggtggcacccaaaataacgtgcctgagtacatcaccatcgccaaaatcagcaacgaaaacttcattgtggcatgcccccttgatgaacaggatctgacgtcgtcgctcagcctcactaaactacacataaccccccagatgaaattcaccaaatgctcgctgggtttcgataacgaacagcggatgttcctcaatggaaacgttcaaacggttcttaaattttgccaattcaactgtgaaaatttcacccgtgtagttgacaacgatacgaactgggtagagctccagcaaatgatcaacgctgttcagcagcagcagtcgtctaacagtctaaatcatctaaccatttccgtcaacggtggttttggacccaaaagcgaagttctcaaaagactcagactaactcgactgtttggcagcagcgatcggaatcaaaactcctcttccgggcacgagaaagaggactcgatcatatttttcagtaaaaatgatctggagaacctcgaatgtagtcaacaacagcaacagccagaacacatgcaacagaacgatccggagcagcagccgatgtccttagcatctggaataagcgataaaatgaaagtgtttactccgagcaagaaaaaatggttcaaaggcttccgatcacatgaaagtccatcacaggaaaatgcagttgacgaacaggaaaagaaacaagccagtattgatcgttaccaggacatgtccagattgatacaggaaagattcggagacatcgatatcaacggcaccaataccagtatcagcagagctaattcggacattggattcgatgatatggttagtggaatccctggcgagacaagtaacggaaatggtttgcagaagtgtctttctttacagcacattgagttgaaaggtggcagcagtagtatggatatccgaagtacagaaaaaccagacttggttaaccatcttaatatgatcgagagaaacaattccgaagaaattctctcggattcggaagataccatattcttccctataagaagcagcgccaaacaacagtctttcatgactgaaaagctctacagtgagttccatgtgaaaactaaacagcatagcaaatcacactccagtatacaacatttgctcaacctggctagtcctcagcgattaaacgacagcaagaacaaatccaaggcaaatgataaaaagcggtcggaaatcatactatcattcgaagatttacagagtctcaacagagaagaagatctcgctgaaagttcccatcgcactcagtggagcttattggatgatctaccatatagcaacgtacgagactcgatcgttttgcaagaacctgaacgacgaactccatcggaaagtatctacgctgaaatatgcgccgatagtcccggtggatccacatctgtatcgcctcggaaacagccagtttttcccgctccgccacgacccgagaaacgatttacaagcatccgtatcaatgttccctccagcgattcgtgccaaatcgttagtcataaccctgctggcaatcgttgtgcatcaaatgttgctagtcctgtagaagacaacatttacaataccataaaatag

SEQ ID NO: 762 - DNA, 4468 bp, Aedes aegypti
atggatttcaaacagcagaatggtcagcaacagttttcgcgaagtggctcgaagctcaaacatcaatcatccacagcatccagtatctcatcgtcgtcctcgagcgccccacaaaaggtcaccatgcgaagacgatgtcgcagcgagagtcttccgatggcaccgatgtgtgaggtcaaaagtagcaaagcgcgactacatagccactttcaccagcaacagcaccataatgccaagacgaaaggagaaacaccaaccctactgatcgagtccttttctctacaaggacacggccggaagatgcttcccgttattgccagcaacgatttactgccaagcataacaatcaataatgctaaggaaaatgtcgtgcagaatggtctctctcgactggatggcactcttaacgccaaggatgtctacatgaacgatctggacgcgtacaggaaagatcgccgtaacggatactacatccctggagaacggcatttcgagtcacggtttgctcgtaacctcgaaagcacttttaatccacgtaatacgatgtacgataggagcaatcgcaagttacgggcacggagcgagtcggaacctcacgaaatctacactagtgcgtccatgatcagtggaacatccagcagcgggagatctacacctgcttgggcaaatcgggaacacatgcgtgatatatctctgaagcgcgcacgtgataacatctctccaacgctggaaggcgacgaaaccatggaatccactccaatggcccagaaagattcccctccgtcgaaaatgctgaatgcagtcgaaagcacctcactggacgatgggactagcacggctcaacagcgtctgggaaaatcaacgaagatctccggcagtgcgaatggttcgcggattacgaaaactgttagaaaccggtctggggcagccgttaacaagtacaaatcctgtctaaaggctgcaccgacgagtgcttcagctattgttgcttccggtggatcggtcgctcacattgtcggccggaagtcggtttcgcctcctctgctcaaacctttggccggttctacctcaccgactccgtccggtatgtcaacgggaaccagtggtggcgaatcggtccatacccaggatctcgatacggaaaccattgggcactcggatgtgggtgaagacgatgatttggatgccgagtgcgaaggcgaggaggacgatctgatcgacgagctcggcgacgatgacgaagtgctgaatggctcgataacggactccgaggacaactaccaaacccatttggcagcataccaggcgcgtacgaaatcatgctcaacttcgccctcgccctcgctggtcaggggaccggtcacgtcgattgggtgcgttctagggggctgcccaccggaaggtccactgacgcctagcttgtttcctcatgtgccaccctacataacgttttccacccacgaggagaagggtcctcccatgccgcctgccattcacaaagtgctcaaatggaaaatgacgctgattacgccgattgtcgtgcggaaggtgttgatcaatagcgggtttcggctgctgaaaaaaaccaacgattggatcggaatttggggcaagcatatgaaaagtccctgcttcaagacgctgcgtccgtaccagaagttcaaccacctgcccggaagcttccagattggccggaaagatcgcgtctggcgcaatctgcaaaccctgatgaaccggcacggcaaaaaggagttcggcttcatgccccgcacgtacatcatacctcaggatctgaaaattctgcgccaaatgtggcccagatatagtcaacggaatgccaaatggattatcaaaccaccggcgtcggctcgaggaactggaatcaaagtggtaaaccgatggtcgcagattcccaagcggaaacccctcattgtgcaacgttacgtcgaccgtcccctgctcatcaacggtagcaaattcgacctgcggttgtacgttctggtaacgtcgataaaccctcttcgggtttacatgcataccgacgggttggcacgattcgcctcggtcaagtacagcgaaaagtccgataccctcagtgatcgctatatgcatttaaccaactacagtattaacaagctgtcgaacaactacaacgccaacgaagatgccgatgcctgccagggccacaagtggaccatcaaatcgctgtggtcctactttgccgagcagggaataaacaccgatcgactgtggggagcactgcgaaacctagtgttgcgaacgatcctcgccggcgaaggacccatctacgccatgtccaagctgaatgtcgccagcagatataactgctacgagctgttcggaattgacgtgttactagactcggaattggttccctggctgttggaggtgaacatctctccgtcgttgcactccgcctcaacgctggacgcccacgtcaagggaccgctggtcaaagctttgttgaactcggtcatgtatcaggtgccaccaaggatagcgatggctgaacaaaaggaaattttagctgaacaaggcctacaaggtccactttgctatgacaaacggatatatgtgaccgcactatccaaggcggaaagactgaaacataatcaatacattcagaaggatatggccagagatgagtacctaagtaacatcttggaagagttgactccggacgacgtacgttgtctgctgttaaccgaagatgaactagccagaagtgccccgctagagcgtatcctgccagcacccaacagccatcgatacgtttgctttaccgaacaccctcggtattacaatcgattgctggacgcgtgggaacaccggtactgcaacaatcgagccgaaggtattgccctgctgcaatctttgtgccaacagaagattcaccttcaggtaccgcccagtacatttaaaaaggactccaacaatagacagctacccgacattagcagcagcagtagtataaacaacgaaaacgcctcccaggacagtggcatccagtcggatccggccagctcggaacttcagtcgcaagaatctggctctgcattccaatcgcaagagtcgatcgatcaaatcggcgaagaagtggcactgtcaaaaaagtcagcgtctacggatgatgcaatggagttggaaaaggaacattcgcagcatcttcgatcgaatgatgatgagagcgacaatatccgacttagcgacaaaatcaaactgatcctggatgacgcgttgttactgaagcagcagcaatgcggtgataccgaaaatgccattattgtacagcagtgatgtaagtagtttcctagtttcgatttacctacctacttatgattcttcgtatcaaagagcgcaatctggagaaagcggaaaagttgcgcgtttatgcggaaattgatttttcccgtgcgtcagattctgggacgcaactctttttctacttagggaaattacagttcttagcgggtttgtgttaacaagactgatccgatgtgttcttcaacaatacaaaacaaaaaaccggaagcgtgtgaaaaaaatagtcttaaccagactactcgaagcatagatgagtagacgtagctttaacaacgcagattgctggtgtaatagatataatgacaacatcccagtttagtccctttgtaacagcccaaatatcaaagtttagagtcacgacaagtaaaaagcactaattgatttttccctttcaagaaatactccttcattagtttgtagtaaaatacatacaaaacttgtacgcataattttcgtccagacgcgcacgattggtcaactgtgattctcattattaaagtggttagtgttctcaaaattttagttccaccacgttaaggcaaaaggggaacgttaacggttgcatatacgaaaagtaattcgaagtaaagacgactacctacttccagttagtttcacactcattctagctcatatattcctctcacgtaaggggaaatcctctctgactggagaaacccccatctccagcgtgaacatcttcatagtgtccccgatacgggcagtgattacgacaggcggggccagtctggcaaaaacatacacatactttcaaatacttgcgatagttaaaaaaaatgaaccggcaaaactaagattctaattataggattaagccaaaaagaggaaagaaaatagacgagaaataaaagcagtcgtttagtaaatgatgccaatgcgagtgccagtggttttgatccgaactatccatttagtaattatgtgctgtttagaaagttaactactgttgagtttgacttgtgacctttctcattgctgcatttcgggcaataaaaaagcgggctctcttgctaagcatcactcacttagcagtggaagaggacctggcaaccctaatcgttcggggcaactggagaaggttcgcccaagaccgacgaagatg

SEQ ID NO: 763 - DNA, 1649 bp, Aedes aegypti
atgacctcgacggaagctgtggactacttggatgataataatgcgttctgcgagaagatcatcaacgagatctacgccgtgttcctgaaggatccggagctaactggatttgaaataatacctatgccatccaacacgaacaaatcgcccgtcatccacatcgagcacaaccttgggttggagtcatggtgcgtccagtatatctacgtgtacgctcatcgtctgctgctccgacacaaagccgaatgcctcaagctttccggaggaggttcgagttcgaccaatctcgtcggcagcagttccgggacaatgctgatgtccagcagcaccaccggaaacaatgcaatcatcaagtacctgaactgtgccatcttgatcaatccggatgtggcgacattctggaacgtacggaggcaacttttcgctaaaaatcggctagacatcacaaaggaattccaattttctgcgctggtgcttagtaaaaagtccaaatcaaatgaagcgttcgcttatcggcggtggttgtatttgtttcaaagttacgatgccatcgactgggctttcgaaattggattgtgtgagaagtgtgccgacaagagcacaaccaactatcacgcctggtgccatcgacagtgggtcatcatgaaggctcctcagttgctgaaatttgagatctacaaaacggaaaagttcatccgtaagcacatccacgactacagttgctacaaccatcgacagtttgttctagcgaaaatgtccgaaacgtcgtttttcgatgagcatgacggaaatgactttgttgagcttatggggtataccagttctttggttgactcacctgttaaaacagtggatgatctgctgcgttggcttgtcccaactgtcgatagagataacttaaacgaattaaagattcgatcgttcttactttgccttaacttagcggcgtacgatttgcgattttgtgacgagctaaaatcaacctacggcgaatcactagcatttgaaaatcatcgtcgatttatgataaagttcatcattgaccgttgtcgaagcgcagccaacatcctaaaacacgacactaacggacaattttccgccacgtgcaatcaaccaatgacgaaaatcacaaaactagacgaacaagacagtgctttcattcgagcgattgcaagtaaagaaaagacgagatccacgcatcaacataaagtatggtgcaaactgttcttaggatttgattttgaataagaaatgctctagtagatcatttgttctgttataggtaacacacacagaccgtagcacatgtttttagtaaagttcctaattctttaagtagcgctccaatgaacaaattcttctcacttttctactccagaaagcttctttcgtacttcacatagcactgtcgagcccgaatgtttgtttttaatattttatttatgttctattaactgtactaggatagaagtgataagacagtctcgaaaaatgtagtgaacaagataaaaaaatagcctgaaatgtgaccagttcagtatggatcctctggaacagtcattatattaatgatagttagtttttgctaaaagtttgattattttgaaagacatcgctgaaagcaataaatttcatattaactgtttttt

SEQ ID NO: 764 - DNA, 4317 bp, Aedes aegypti
atggtggcggtggccatcgggactacggtggtttccggaaacgatgcgaatttcctgttcaccgcgaatcgtcttcccgcaaaagccgtcactcctaccctggccaacgggaacatcgctttcgtagtctacggtgatgccgtgcacatgaacggagtctacaatggtcagcacggcttaagccaccgggcccgtatacccaactacgcaaacctccagatgccgtactgtgcgagcagcatcgccgagccgaccggatgttcctaccagttggacatgaagaacaacatgttccgtacggtgtacgaagacccaaacgggagcttccgcattgtgcatgacgtctatcccaatcggtactttgacaaagcgatcgttaacaaggttcgaatccagcgactaaactctcaaagtgccatcaccctgaatctcgatcgacgagagggactaccgagcgttgatgtcacgttcggtctgccacagatggccgatgttgatggtgaaatctataatcgactgtgtggccaaaccaaccaagtggaagatagccgctaccaacagtacggccacgatgtgtgcgtctactatccttctcttcgacaaatgacgctgactgtcgataaaacagctgaagaattcactttcttcacggtatttgctcactcgacaatcgaggcagaaaccgaacttcgatctatgaaaagaacaaatgtcgaatcgttccacctccgagaaatggaacgcgtgtgggaacggtatggaatcaccgtggaaggaaacgataacctcgatcgagtgctgaaggctagctcgttctacctatccagttcgctaccatccacgtacaccaatcagatcagcagctatccattctacggtctttctccatccggtttgggtcgtggtggagaagaattgaaggaatatcaaggtcacagcttctgggacacagaaatatggatgtatccaccaattttgctaatggatcctcaaaacgctcggaaattactgcgctaccgaaccgtagttcaccaagcggccgttgacattgctaagaaaaacgggtatgaaggttggcagttcccatgggaatccgcattcactggaacggaaacaactccagaatgctgcccggaagtcgttgagtatcaacaccacattaccgctgacatagcgttcgctgctagacagtacttctacgcaaccgaggatttagattggatgcgtacagaaggttgccgtttggcctacgaaaccgcaaagttctggagcagccgtgcagagtacaacaacgccactgacctctacgaaatccaccgtattatgggacccgacgaggatcatcataacgtaagcaacaatcctttcaccaacgtagtggccgctcataatcttatgttcggagagttcgcaagttgcttgtgtgagggaattgtaggagccaccaaagaagatcgcgcgcaattcgctgaagttggtagaggaatgacgttgttgtacgacaaagagaaggacttcttcccgcaattcgaaggctacgtgcaaggaacattgatcaaacaagctgacgtagttcttctcggatatcctctggagttccaaatggaaaactcaacaaaagcgaataacttggagatctatagcagggtaacacgttccaatggcccggctatgacatgggctatgcataccattggtcatcttgaactaggacagttgcaggaggcagaacaaatgttcaccaagagctaccaacagtacatgcgagcaccgtacaatgtttggagcgagaatggcgacggaaccgatggcgccggtaatttcataacaggagccggtggtttcctgcagtccatcatctttggctacgctggtatacgcctacacaatgggcaaatagtgattacgaaaccattactgttgcctagcacgtctcgactctacattccggaaatcaactatttgggaacgaaattctatttggatgtcaagaataataacatcaccttgggactgaaacaggagttgaacacagctactgttcagattatcgttgacaacgaagagctcacagtttgcgactcttgtgctgtttctttcaaggatcaagtagtgatccgcgcgaataggccttcccatttcaacggctgtcagctgaaggaaactacgattggaattaaggttgctgatcagaacaacgccgggcacatgacacgcctagcctcgatttttttcccagatgccaccagcgtgccgacgctctcgaacggaaatctcggattcaccgtatttggtgacagcgtctacctgactggagtttacaatagacgtgaatctcagagtcatcgtgcccgtattccaaactacgccaatatacaattggaaacatgtagccatccggagactaatccaccctattgttcctaccagctggacatcaaattcggctactttcgaacaatatacgacgatcccaatggagcacttcgtctcgtccacaccgtttatccacatagatactacaatcacatcattgttaacaatatccgattccaacgactgaatggtcaaggtacactgtacgcaaacattctacagcctacgatatcgccatccgccgatatttcatttgatcccgctgaaaatgctgtaactccagacaaatcgtatatgagtctatgtggccttactaatgaggttgaagatccagaacttcaaactgaaagaaccaacgtgtgtgtatactacaaagatgtaccgtccactcttgtgttatcggagaatcgcaccgctgaagagtttagtttctttaccgtgtttgcacgaagtagaacagaggcggaagctgatttacggggattgctgttcagtataaagccaaatgaagaaaaatcaagtgtagactggtttcatgagaagcatatgaacgaactttgggatcagtatgggatcaccgttgacggaaacgatgagctagatcgagccatcaaagcgagcgcatttcaactgttcagcaatgttccaaccttgtatactcataataaagtacaaacattcggaatatcgccttcagggatagggcggaacgattttcaaggacacgtcatgtgggatttcgatatgtggatgttccctgtagtgctgctagtagatccaatcgttgcagaagaaatacttacatacagaacaagagctcttaagaacattgcagaagatatgctaacttacgaaacaactattgttcagaaagcaattgaaagaaatgcagcaatgaataaaaatgaaggatggcagtatccatgggcttctgccttcacaggccgagaagtatcatcgactcaagaagcaaccgaaatacagcatcacattacggcagatgtcgcctttgccatccgacagtacttgtatgctacaggaaacaagtactggatgagaacgcaaggctgtgagttggcctacaatactgctcgtttctggaaaagtcgagccgtttataactccgatacggataagtacgatattcgtgatgttacgggacccgacaccatgaatcccaacgtcactaacagcgtgtacacaaacgtcgtagcagctaacaacctgtttctcggcgaatacgcagcatgtgtgtgtaataccgagctgaatgtccacaagaatgattctgatgagatgattagaattgcgaaaagtttacatttgttgtacaacgaaaatgaagacttcaatccgcagtttgaaggctacgtgttagggcaagagatttctcaagcggataccgtgcttcttggatacccacttgaccttccaatgaaaaagtcgacgaaacgacggaatctggacatctatagttcggttacaaaaaattcaacactgacctcggcaatgcacaccattggatggctcgacgtagatgagctagacaaagcagcggacagtcttcgccgtacttatcagccatatctacgttcgccattcaacgtgtggaaccaaggcactgttgaactccccggagcatcgaattacgtctccggtgcggccagttttctgcacactatgataaatggctatgccgggattcgactgcggtacgatgagctggtgctggatagacctagactcccacccggaacgacaaggctcagcattcccgagattatattgagtcactatcagtttgcgctagaaatacatcagaacggaaccttctcaatcacccaaaaaacgggagttttgcctcccttcgatacactagtgactatcgacgaccaaccagctgttaggtgttactatcgcgacggatgtgtttgtgagtaa

SEQ ID NO: 765 - DNA, 3241 bp, Aedes aegypti
atggatccaatattcttctctccgcctaatggagtcccgtcagaaagcaaattggcaacctatatgagtcgacaaaacgtttcgacaccaacgtatgggttgtcaacgggcctcagcaaactaacactagactcccccatatcgattaagaaaactcaggtgaccccccagtcgccagaattcattccaaacaatcgtctcaacacatcatcatcaccaaacttctactcgtcgtactcgatactcgctggcagcaacggaagtggccaagtcgtcggagcttccggcggcgctggcaacggaaacgctgtgataacgtccaacaatggcacaacggtggtggtggcaactccgggaagcaccggaggatcagttcccggtcccgtcccggttcaaacccaggcagcacagctttcatcggtggcgacggcgatcattcccaatggcaccggtggactagctggagggggcggaggaggaggtggaggagggacagctggagctaacggtaacggcaccggtaatgggtccggcgttaaatcccaagccagcagctacgggagcagtatccttggtagctcgcttagcaatagctcaacgtatgctgtgacgcccatcaagggtaagtggcgaagtttactccgtaacgaatcaccacagagtactaatacatctcctcgaatcacgcctcaaccatcaccaccgccaattaccaccaacatccatcaagaaaacgtcggtggcacgacgtatttctatccgaccgcagcgaaccatcaattaacaccgagcagtacagttaacacgactgaaaatacctttgtccacgtcagtgagctttcgaacgcttcctctttcggaaagggacctttccatcaacttttcatttcaggacatgtctacccgggacctgcatcgcacgtggtcaacatgcaagcgaaggcacaactgtcgatggcgtacttcctgcaggacgaactgagaaacgatattttatctaggaacgaaatagtcaatagtattgaaaccgagtgtcaagatttacctctagaagtggagaactatcattctttatgtctgctagaatctttaccagtccatcccaagctaccggtacagtcgtccacctacaaagcaacacacaatctaactggcgttaaatactgccttagacgtcttcatggtttccgtctccagtcgaccaagtgcatgcagattgtcgacatgtggaaaaagcttcagcacacgaacgtagtacaacttcgagaagtatttactacgaaaacctttggtgataattccttggtgatagtgtacgactatcatcccggatcgcagacgttactctcaaaatacttcatcccgagcgcagaatctacgaacggctattccgatccattctcaggtgaagtgcgaccttttagtcacaaaagcgcccttcatcgggcgtctaccagtacgctgctaccggagaacgaaatctggtcggtgataatccagctgtccgccggactgcgggcgattcaccaagctggactggcctgccgaacactggaccccacgaaaataatcatcactggcaagcggatacgattcagttgcgtagcgatttccgacctcgctacgtacgatcccagccaaacgaacccgctgaccgtggtcaatcatcatcaacaggatgatctgactgccttcggcaaactgatcctggccctcgcctgccgaagtttacagtccgtacagcgagatcagatccagaacagtattgagctgatatcgcggcactactcgtccgatttgaggaacattattctatacttgctctcatcgagcaatcggcgctcggtgacggagatcatgccgatgatcggtgcccgcttctacgtgcagctcgatgcactgcaatcccaatgtgatatccaggaggacgaactggcgcgggagatggaaaacggccggctctaccgactgctggtcaagctgggcacggtcaacgagcgacccgaacttaacctggatgtcacgtggtccgaaacgggagatcggtacatgctgaaactgttccgagattacctcttccataccgtcacggaagacggccgtccctggctgaaccagtcccatatcgtgcagtgtctcaacaagctggacgcgggcaccgtcgaaaaggttcagctgatgtcgcgtgacgaacaatcagtattagtggtgacttatgctgaactgaagcactgtttagagcaagcattttccgaactggtagcggcaaccaccgtgtaataaggaggttcgcgtcaaaccccagcaacaacaaaaaaaaacgaaaaaacttaacttgaggctcgagagatgtgtaatatttttgtctgtgtaagagaaaaagcgtttatgatgatgatgatacaacaaagaccacagcagcaacaacaacattaacacacaacaggtttataatgggagagagaaagcgaaagaatgcagtttctactacaactacaatagaggtacgttcgtgatcttatttttatacacatacatccaaaaaccggacgaacagaggaagcaacataaaacaaacaaaaaaactggatcgttagaaactgtatatgcaaaataggggagaaagttgaaattcttgttaaatctacaaattgtgtaaccgacagaaagtgaatcgatagagatcaagaagtactaaagtgagaactcgcatcatcatcgtgtggtaacccaatatttacaaaacccacatgaaaacggtagaaggaaggaatgcatacacttacacacacacacacgcacttactcatacgcgaactgtagttacatttggacaggagaatgagcgcggaaagcgaagaaatcgagatgacgagagcgtaaccaatggaccaatgcacgagttcactaatttgacgtttgagcggtgccgaattcactcgttgtcatggacacgtaaataacacggcaccgctcaaacgtcagatagtgaacttgtgcatcggtccatttaaggaatgaatccgagaagggaagaagagtttacgaggtgagagtaaggggcagtgtttggagatagatggtttatgttaggagatgttcatttgtaagtgatttttgtgaggattatttcatgtaagattgctagtttctttggaattgtgatgtcctagaagagctaaaattgtgtaaatcgaaagttgagaatcaataaaaattggcagctgaaacggaggtagtg

SEQ ID NO: 766 - DNA, 5155 bp, Aedes aegypti
cgctatggtagtgagaacatgacaaatctgcttccgagtgggtagtttttctcattcagttggtttacttttcgcgctgtggacttcgtggtagtgccttagttctcgggcaaggttatggttaaggtttattgcacatagtgataatgctgccgtattgtcctccgcgcttgttcgacacgatggcgatatgaatggacatatgtcaagagagatacatatgtatgttcggcgtttgcgtcgtgaacgttcgttcactcaggttcagtgattaagggcgaccggaatgaagctgaaagaatcttaattacacagtcgttaaaacatcataacagcgtcagcaattctaaatggtctggtttaaccgggcgggacaaacaaattcaacctctttccggcctactgaacaaaaaatctgcaaaataaccaagcgattgccgactatctgggaagcaatggatacacagacgctttggaggctttcagaaaagaggcagatatgcccaacgaaatcgaacggaagtacggcggactgctagagaagaaatggacctcagtgatacggctacagaagaaagtgatggagctggaggcaaaactttcggaagccgaaaaagaggccatcgagggtgccccgacaaaagccaaacgcacacccaccgattggataccgaggcccccggagaaattcgcattggccggacaccgagcgacagtcactcgagtagtgttccatccagtgttcagtatgatggcctcggcgtccgaggatgccacgatcaaaatctgggactttgaaacgggcgagtatgaacgaacactcaaaggtcacaccgactccgttcaggatctggcatttgactcacatggaaaactgttagcctcctgcagttcggacctgtcgataaagctgtgggatttccagcagacgttcgagtgcgtcaaaacgatgcacggccacgatcacaacgtgtcgtcggtgtcgttcgtgccagcgggtgattacctcctgtcggcatcgcgggacaaaaccatcaaaatgtgggaagtagccaccgggtactgcgtcaaaactttcaccggccaccgggagtgggtccggatggtgcgggtcaacgtggacggttcgctgatggcgtcctgctcgaatgaccactcggttcgcgtctggcagaccaactctaaggaatgcaaggccgaactgcgagaacatgaaaacacagtcgagtgtattgcctgggcgccggaatcggctgcggccgcaatcaacgaggctgccggagccgataataagaagggagctcaccagggaccgttcctcgcttcgggatctagagataagaccattagggtttgggatgtcaactccgggctgtgcctgttcacactcgtcggtcatgacaactgggtacgaggcatcgtgttccatcccggtggtaagtacatgctttccgccagtgatgacaaaacgttgcgcatctgggacctccgcaacaagcgctgtatgaagactctatatgctcactcacacttctgtacatcgcttgatatgcataagtcacatccgtacgtcatatcgggcagcgtggatacgacagtcaaggtttgggaatgtcgctaagcacggaccgcgtgcgtattcgtaggaagttttcttcttttgtactcgatagtgatgaaatgaaacaacacactcacacaaacacatgcatacatacaccaactaatagaagcagcgtgaaaggagcagtggagcggacgcagctgagcagccaaccatgtaagaagaggtaattctatttgataagcaacatactatttcagtaacaacaaccacgtgcaaggcaaattatacattcatattctacataaccttcaacaaacacataaataacaaaatattacaaacaagcaaaatattacacttgcagtaataccacagcaagctacaccaactaaaagaaaagtaaataattgaaaataaaacccgtttctttcaaatccgctccaattttcaaacggaagtaactcttattcaaaactacaaacatattacaacagctgaaaacgtttctgaagccgtcaacttaaacatgggacacgagcaaattactccgaacacttagccggacacaagcagaagaaaaaagctataacatattatcatattatattcttataattacactattcttagaaagtagacatcatatttgaaaacttgaaaaatggaatgtagcattcgcgtgatgaagggaatttgatcggggacagggcacgactggcagagacacatacaacatatacagacatgcgaaacgatgaaggatggtgtgactaggacgagaccgataatcaagacgcagaacctcaaggagaacgatttacaaatggtccaacgaatgtttgttggttatttatctctcttaatcgtgtcaagttgattcgaagcatatgtgtcgcccaaccgtttctcactcagcaaatgcgccaggttaaaaggtatgttgaagagtgtcctgttcttgttgaaattgctatttggtgtgacgaaaatttcctagaaggcgttacttgttgatatatttttgtatggactcattgatactaattctttaatattgaattcttgtgataatccgctattcccaatgattgatttggagaggtctgaaccagttggcataaagccatttgacaccacggacatttgacattacggtcatttagcacaatggtaagcattacatgtttctgaagcttaaagattatatttaagatgaagtttgaaaattgattttctacatttttaagtatctttgaggaataccgcattaacctcgtttttatttggtccaaagcaaaaattctattaaataatcattcaaaatactttctggtttgattttgtactgctaggttatcgtgcaagttttctgtagattatcctaattcagcataaatcagcaggaatataatgttgtacaatttcctaagaaatctagtaccaagttcggcttagccttttcaagattgtgttctggatattgcaggaggtaatcatggaatctaccacattgtgctgctcagttctgatttcactgatccctgctgctgccataattaagcccgaatcagcatggtttgacctgtgttcatttcttgtaaatattaatatacttacataattacttttaaagttaaacagtaatagctctataaagagatgggttcttaagtttcacattaatcgcaagcaccttaataaatttgttagaacagtttctattttacatgaacgatcgcactgttttgccactttctagtgatattatagaacaagattaacaaaaccgctagcccatagattcgtgaaagagagagtttgagcgttgagtgtgactttaatgcgtgacgaattgagaagagaaacaaacacacgtgagagaaaataatcttcaaatatattcaacccattttgtaaaaagtacatccatcatactaaatttcaaaccaactgactcacatacacacacatcggggaatacgagttaattgagaattgagcgtttagaagcgatggttattaaattattaattacaattaaagttagacttacataaagtgaaaggaaaaatattagaactacatagatatagctaaccgaaaaaagagcaaaattgaaaaccagaatatctgaattcttatgtgaaacatgttttaattggtgaaaaagaaaatgaaataacttatatcgataatgttgcttcaaatctgatgagttgattctctattctatacatttaagcctgctagaaaattaaacaacactgcaacgttgaaccaactctaccgcactggtttgaggaaggccaattccatgctggatagtttttagagccggaaaagcgatatgtattttctaataatgttcccagtagcagagaaagagcagagaaaccttgcttatatcgacacactgttctattttagataaaccctagctaaagtgccgcccgcaatgatggaatcatagcttttattatttcgataccagttccagccctttgttccactctgtggaacatcagaaggaaccttggttcgctttgaagaaaaagttctgataatgtagtaatgcgctaattattttgaatctttttatgttaattttctatttttgaaagtgggaagatctacgtgtggtagttgccaagaaatgtgcaattcaagtaattttatatatgattttacattactgataaactgttcataaccatcgttaactaaattgatgtaacggaagaaatttaaaattaacgcaaaatttttcaaaacattcctattaaattgacaattatacgtttctttcaatgctcgtccttgattaacaacgcctcatcgacaaaagcgatttgattttatttatagcgttccagcaaatacaatttacaatcgttactagtcgaatttttcgtttttcaaatgaggcaatcccaaactccttagaacttgaattggaacttccggcttggcaacttccgcctaggttacttcctctatctttatatgagattcagtcaaacttaccacctatagagcttcgaaaatctacgaccagaagaaacaacagaaaatgatgtggaacgaattttttagccgaatacagcaaacgagcgtaaaagtgtagttcttttgaagagagtgcaaatacttttagggttagttttttttagcgattgatgatttgcaagacgaaaaacgattaaacgattgagagaaagagcaacaacacgattggtcaactcatggaagaataataaaatcaactaaaactaagcttttcgatgcgatacatccaaacatgataaaataacacgagaaaggaatgattgctaaattatgaggaaaaatagaataaattcaattttagtaatcaaaaaccaaacattacttacagaataacaacaacaaacatcaaacacaaacatcagttaaaaacaactaaacatcaaatacaaatgcaacatcgctaaatttgaaaaaaaaaacgattgcaagattacaacagcaaatctgattctatgatgtgacaacagcatacttttctttgtaaatactattgaaaatggtaataaaatatatttaaaacag

SEQ ID NO: 767 - DNA, 3328 bp, Aedes aegypti
cttttttgcaagggaacgaaatgagattgttgttgtcattctcgcttcagccaggaagggtcgcgaacgattttttggtggaatttttctacaatttcctccgttggaaaagtgctcatttgtggtcggaaagcacaccggaagtgaactgcattccgctcgaatcgaatggaaaagtgtttgtcgggtagatatttgaaaatttgttgcttttagatttgtatccgtcgacccaagccttcgagagtgtggataagaggttgcgaggtactttccaaactttggaaaccgaagagattaacgaggcgacgacggagaatttcgatccaaaatggtgaagagaaaaactcaaccaataatcgattcagaaagcagcagcgattccggatccggttcggatcttgattcggagctgctgtcattggccaagaaaaagaaaaccgccaggctggcatcgaattctccgggagggaagtcatcggattccgattcggaggatgattccgagccagaagcggcagtgcagcgtaagaagcgaaatgccaagccagcctcatcctcggagtcggaagatgaggaagaggaggaggatgaggaagaagaggacgagccggaagaggaggaggtcaaacccgcggccaaaagtggcgtaaagcgtaaacaaccggatgaggaggaggaggaagagaaaggcggatcggaaccggaggaaggccaggtttcgtcggaggaggaagaggaatctggtaccggttcgggagatgacagtgatgatgaaagtggaagcagcagtagcagcgattccgagttcaatgacgggtatgatgatgagatgatgggagatgaagaagatcgggccagattgaatgccttgtcggaaaaggagcgtgaaacggaaatcttcaagcgtattgagcgacgcgacgttatgaagacgaggtgggagattgaacggaaactgaagctggccaagaaagcagaacgcgcgaaggataaggaatcgcaacctccgaaaaagaaaaagaagaaggacaaagcgaagaaactggctcagcagaaggagcaagaggagaagaaaaagaaagccaaggctccttctcctgtgccgaaggaaccgtctccacctccaccagtcgttcagcaggctgagccttccgagggagaagctagcgacagttcccattcctcgccggacaaatcaaaagacgcagaatcggcttctggtgcttcggattatttcgatccgaaagaacgttcaaaggaacgaaagaagaacgttgaagccaatcgaacagatgacaaacgaagcaatgccatggccatgttgaaagcgaaacgagaaggtaaagccaagcgtgaggaagaggaagctaaaaaggaagcgcagcgcaaggcggaaaccgaggacaaggatgatctggatgatgttcctggtggcaaatcgcaaaagcttaaagcttcagacatctattcggacgattcgggaagcgatagtgaagatgataaaaagtccgatcgtcgatcgagatccggttccagtagcggcagcggaagcgacagtcgttcctcctccgacgaggaaacgtgggacaaagaaaaggactccaaggaaaagaaaccctcgtctagttcgtccagttccagtaagaaacctgccgctatcagcaataaagaggagctcaacaagttacgaatctcgaggcacaagatcgaacgcttcattgcgcttccgatgttcgatcagattgtgctgaactgtttcgtgcggatcaacatcgggaacaacaacggaagaccggtctaccgcgtggcggagatcgtgggagtcgtggagacggccaaaatctaccaatttggaaagtgtcgcaccaacaaaggatttcgactgaagcatggcagtcaggagcgggtgttccggctggagttcatttcgaatcaggactttacggacagcgagtatcagaagtggttgagcgtttgcgaagccactggaacggcgctgccctatgtggacgtcattgagaagaaacagcgcgaaatcaaggaggcgatacagtacgagttcaaggatgcggacatcgacaagctgatcgaggagaagaatcgattccgggcacatccgaccaactatgccatgaagaagacgctgctcatgaaggaacgtgatgcagcccaactgcgcggagaagacgaactggcccgcgacctaaacactcaaatcatggagctcgaagagcgtgccagcactctggacaagaagcgtagcagcagtattagtttaatttcctacatcaacgaccgcaaccggaagcgcaacgtggaagatgccgagaaggccatcaaggaggaaattcgtgccactcgcggtatgaagatcgaagatcctttcacgcgacgtcagactcagccacggatgtcgttcaaagcatctgagaaaaataatgaagtccccaccatccaaatgccggcgcctccaccgccgggacagaagaagaaaccagacgagaagaaagccgcatccagtgcggacaacaacctgtactcgttgcatgattttgaaatcgatctggacgtacctcttccggtcggctctgtcaatgtacttccgaaaccggtggagaagccggtcaaagaatccggcccgaagcggtcactcaacctcgaagactacaaaaagaaaaggggtcttatctaaagcaacacactattcttaccgagaacgagacaactatcggtattaccttactattactctatactgttccccactaagtagcaacggaattagtagttgcatcggaatttgaaaatgtttcacgcttaaacattgacagactccaccccctcacctaacacacaagacaccacaccgaagagtttggtaatatctattcacctgtttttggataaaaattcaaacgagcactagcgaagattctcacgctatatcctcccttgttggcatgattgattctttgttcgattagagatccttagaagaatgctttatttgaaccatggaaattaacccgttgcaaccacgatccacggtgggtcgacagacagcagaacaatagcaaactattacgttgataaattgtgtaccacttagactgtcttcttcttagttttatttattttcgtcatcccctcacgatatcaccgatgacgacgatgacgatgctaattgtgtaggataatcaaattaatactgctggaaaagcaaatttaaatactataagttcattgtaagcgcattgcaaaaggcaggaaaatatttctgagcaagataaggaaggaaaatataacaaatgtattgttataactg

SEQ ID NO: 768 - DNA, 1014 bp, Aedes aegypti
atatttggtacgtggtgtgcggcgtgtgcggagtcgccgctctgtggacttccgatttctacctgacactgttggtgatcgtgattttcctcgccgttggctgctgcggatcggtgctcagcgccatatcggttgatctatttccaactaattatcgggcaatggcgctctgtctgatactgatgaccggccggcttggagcgatggttggcagcaacgtggtcggcgtcctgctcacctacaattgcgaactgatcttcattgtgatggggggactgctgatagtttgcgctgcaattggaacgaccttaccgggaaagtgacggagcacaattcgaaaaatgctgatgtctactgccgctgctcttctttcatcgaatcgtaccttgtcacaatcatctcgtcatcagcagcacacctctaatggcctgcccaccatcaatatgttcaatcaatttactacgcacaagaacctgcgtcaacgctgccaaacgagcgaaactgaaaaaaaaaatcatcaatagcatcgatagacgtgcctttctagctatagcggctcagtaccgctggcagttgagctagaaagcctcagctagcgtccatctcgcgggctatcggttatcagccaataaaattgcataaataattagctccgtgaaaggtatagagctgtcgatgagagcaagaaaaaaaagatcggctaagcatgaaccggaaagtgcaatcaacgaccgatcatcaaatagcaactaggtagatcctatagagacttcattttacgagctcacacgccggcgatcgacggttatcatccattagctattaggacgatcgatcggagtaccgccaactacgcaggcgagcttcgatcggggaggccataaatcaattttacgaggcctagttgaaagtgaagctgttcgatatgagattgtattatggaaagaagtgtagttgttagaatggattcgatattttaactaataccaaagtgaaagttattcaatacgtcac

SEQ ID NO: 769 - DNA, 3707 bp, Aedes aegypti
tctggatctgtcaagagtgcaaagtgaggagatcgagagcgaaaaacaaaatttgtgagagagatagagagagattatagaaagagagtgattaaaagcgtggtggacacgagagtggcgtatgcggtgtgaatcttcgtgcgttccgctaatcaacagacaacagcatcggttgtgagcgaggggcgagtggtgagcggcgagagagagaagtgtagcagatcataaaaacatctttccaactgcttattctggactaccacatattgtctcctcaaaagtacgtaaataggaatcacattcatcagcagcgaacgctgttgttaactatcgcccgatggaaggacagactttagttctcccggaaagagggggtggaggaagagatgaaggtggaggtgttggtactgaagaattgcgcgcctttgcttccgttgcggaacaaggtgaaaccgccgctgagaaaacccaactctgtccgccccgaacccgatcgcaaggtggcagtaataagaagcagcagaacaagcatttctcgcgacagcaatgtaagagcaaaaagtggaaattgaacaaatttaggcgcaatcaaaaggatggcattggtggagggaagaaaaaggatcaagcgaaaggattggattgtggtttgaccggtgggaaaggagatgaaaagcaaaatccgttgggagttaatacggagtgcaaacagcaacagggcaagagcaaacatttaaataagaacaacaatagcttgatgcaagcaagaacaaaaaggttgcagtcggtttcgaagttctttctccctgataaacgaccgaggaaagattgtatcattccgccaacaaaattcttactgggtggaaacatttccgatccattgaatttgaacagtttgcagaacgaatctgagaatgctgttaccccaaaatcttcgcccattccaactcctccgcattataagaacaaaatcgaagttatcatcccgccaaacatcaacgacccgctgcatttattggatccggtggattctgtcgaatatgaaatgcaactctgctcgcctatgaaaaagaaacagcgagcccgcaacaaacggaaacgaaagtcgaaatctgagaagaacaatcaaagcttggattccagcgcggggatcgctgctggaggtcaacttagcacaagcatttcggaagccgaagcaaccacagcagaagaagctcaaatggaagcccctgggtccacaggaaagaacgttgagcattcgcttgaaggcgggaacacgggtgatcgcgataaagctacccgatgtttgcgattggacttggaggtttgtcgcaaacgacgaattagcgaaagcacttgttctagtaagaacaaggtacgtcggatggactctatggataagattgtgagtccggttattcctcaaccaggtgcatggaaacgtgggcattggccggccatgcctgttggaggccgaaatcgcacacgaacccaatcatgcacatcaaacagcgaagaaccacccggtaagcaacccgttctcgaaggggaggtcaacactgaaactcctcaaaccacagaaccagacattaaggttaataacgttgaacaaccaaaatctgaacctagtgaaagtgagacccaagccaaacccaaacctcacgaagattcaaagtatcactacggcaattatgaccgatattacggatatcgcaacttgaacgagtttatcgacgttcggctcaaagtattcctacgcaatccatatctgttccgagataaggatgttcttgatatcgggtgcaacgtgggattgatgacgattgcagtagcgaaaatgctgcacactaaaagcatcaccgggatcgatatcgatgagaaactaattgccaaggcaagacgaaatcttacaacgcacgtcagaatacaaccaggacatgcaaaacatggtggggaaactaagctgagtggggagaaaaggaaaagaaggatatccagaaaacttacaactggcgaagagaagtcattggtaaaagaagaagaagctccacacgaagaaaaacctgcagaggttccggacactgctgaaagcatgcccaaaccggaaacatcatccgccaaaaaaggtcaacatccgcatcggcggaagtttcccggccgtcacggtcacggaaaacatcatatgcacaaccatcatcataatcatcaacggaaggatcccaggaagggcaattcggagttttatccgatttcgtttccgttgtcgttgggaaacctcggatctaaggcgtgtctgttggagatgggcgcgaaggatcacaaattcccgaataatgtgatcttcaaaacgatgaactacgtccttaaggatgaatcgctgataaattacgatactcaacagtatgatctgatcctgtgtctgtcagttaccaagtggatacatctaaacttcggtgacaacggactgaagatggcgttcaaacgaatgttcaatcacttgcgccccggcggaaaactgattctcgaggcccaaaactgggcaagctacaagaagaaaaagaagcttacggatacaacttgtgagaactacaaaaatatcgagtttttcccgaataaatttcatgattacttgctaagtcctgaaataggatttagtcacagttatcccctaggtattcctagacatttgagcaagggttttcggcggccaattcagttatacgttaagggcgatttcactccgagtcaggctcaatggagtgacacataccatccgcagacgccgtatgtcaaccaccataatatctacacagacattaccacccccacacagaatccctgcatttggggttccacaacaccgtatcagccaagttacagcacccgttgtacaccgtcgcacagttttatggccacctcaccctactataacccgagacaaaccgacagctaccaaccgagctacgatgcgggcaatcgtcgtggtagttactgtttcgcttcacccctctactcgaccacctggtcgccaccgtcggatttgcgtcaccggcgatccgcctccaatacgcccaattcggccagtattagaagcgcagaaaacgatgaacagttcgcacaacagcagcatcgtccgcacgtatatcctcctatggaggtgtttccgctagaatcgactgccgttcgatcggtagcaccgggatcggccagcgttcggcaaacggattccgattcggaaccgtcgtcgaattcggcttcacaaacgccgacgcggtcgcagtacgatgtagaccagtcgtcgaactcacccagtactacgcactcgcaaccggacaagtagaaaacagcgtacctttgcttacaggtttcagttttttttatcgaaatagttgttgaaatcatttttaatatgctgtgattgggatgttttttttattagcaaacatgtaaggaacttcacaggataaccaacagtacgaaactagtccgtttgctttgtggaaacatttttttttctgatgttacaaagaaattgtagtacatacaatgagttagcattacaagtcatacaacaacaaccacaatatttctctttgggctgcatctcaaacaaactgcttataatgtaggaaacgaaaacagttgttgtatatagtttataagttgcataatttgtttgtcaatgaatatctaaaaatgagataaaa

SEQ ID NO: 770 - DNA, 3644 bp, Aedes aegypti
atgtcggaccacattagagcagcgtcgatcgatagcagcaaaggcaatggcgggagtgcatcaaatagtgcagttctacccacttcgtccggcagtaaccatgaacggctcgcagagacgcagaaagtacccaattctgatgatttgtatttgttcgactcactgattgagctatgcaggaataatatcaaatactttgcgagtgatgaaacggagactgggcttagaattcacggagctttcgtggggttgattgatcacattgaaaccgcaaggcctttggtaaaagaagttcatgaattcgtgcatgagtatgacttcgatgaaaatactccaggaaatggattcagaagttttctgtatgtggttgattcctgtgtcaagacaactctcaagctggcgaggtatgtaatggaaaatcgaggaacgatacttttcagaaaagctatttatgtaaaagaggtcgaagcatacaaccatttgatggccagcttaaacacatgcctcaaacactgtcacactctacgtgaatggaccacgtctggagaactattccccgaaggacgatccgttgaagaacttcttggcaaagcggatacaatcaaccagttctgcttctatggacggtgtctcggctttcagttctgtgaatcaatgaaaccgttactcaaatttatatctattgggatggctggtttttccgagggatattactccgaaggaggcaaaatctctaaagccacaagcttaatgtatacaagtacaaagtacatgttggagccggaacttcgtgctcgacggatagtgaacatctcgcagcactcaaacgtggacttttgcaaagcattctggtttttggctgagtcggagctgatgcactctctgccgtcatttgtgggattcaaggtgaaggttagccgagtgattaccataccgccagaacctatacaactaaaagcagagaagtccgatgagataatcaacatcccgatccctcaaagccacggtggagctggtccagtcaaagcacggcttatcagtgcagtgaaacgcaaaggaatgattggagagaaagtcaatacacgcagtaccatttatcccccgtccaatggattactctttcactgccatggaggagggttcgtagctcaaagttccaaatctcatgaagcgtacttgcgcgaatgggcggtaacactcaatattccgatcctgtcgattgactacagccttgcaccggaagctccattcccgcgtgctctagaagaggttttctatgcgtattgttgggcattgaagaattgtgagctgcttggaacaactggagaaaagatcatctttgcaggagactccgctggtgccaatttaaatttgggttgtgcaatgaaatgcatcgaaacgggcccctgcacgaatgctatgcctgatggatccgttactgccgtttgggtcatgatgcgctgcttgaaggcttacgcgtgtccaagcaaagaagtgctcgaacaaaaccgaaagcgccacgaggaaagacaagcgattatcaatgccggtcgaaaagtcacagatgaagtgccgaaaatgttggagcttaacggaaatgcatttggcaaggccgcagaagacaacaagtcagaccattcagaatctccggaaaattccgcttgggaccagttgaacagcttaaacactttacagttgaacaatcagcacctgagcccgatgagtgacactgtgagtgatacgattgcgctacaagggcaaaccgtcgggaatacgattgatctcatgagtccagacgagagcaacaccatcacgtcgttggaagaagactcgcagccaatcacgttgcagcaagtcaatttgaacaccgaaaagagcaatgtaacggtgatggacgatttggacatggaccttcccagcgatatgagttcggagcagaataccaacaaatatgtgtcggatttcatcgaaagatatgtactggacacaaccacgaacgcagcaggagaaattgagccagtcttgagaccggtttcacgatcagcttccgaggagaatgtagtactggacataggaaaagaaacaattagtgtacaaaacctacaagacaaagtctccaacgcggccagtaacctggtaaaccgggtatcctcgacgttcaattccatcactacttcgaaaccaattaccaccagtggatcgcagtccgagttccaaagcaatctggaagcgctgatcgcccgcagtccctcggatgagttcatctttgaagtgccgaaagactctcacatgtcaccgtattgggcctcggatgaagtgttaagccaatttcctcagacgaaaattttgacggttgtgttggatccatgcctggatgactgtgtaatgtttgctaaaagactgaagaatctgaacaatccggtctcactggatatattgccagggcttccacatggatttctcaattttgcgtctatttccaaagaagcacatgaaggatctaaactctgcgtcaaacgtattgcagaaatgctcgaagtatcgcttccgacggatgatctcgctactaaaacgtgttgttagcaaatcggtcgctgcctaacagaatcgaagcatttgtttcgcaaaggtagtgaacgcatcgataacgtttagtagcatacactgtactgcatcacaaacgcattaactgctaaccgggtttggatccgaatggagctactttagagaagctatttaagccgatgttcaatcatcacgagaatgtttttatgagtctcgtaatgattttgcatctatgctttttataaaaaccgtgacacgctataactacacttttgcaacaaataatactgaacctttggaatcttatattaggcagcttgcgcatagttatataatcataaatcgaaggaaatttaatttccatcccgattgtgaattggcctttgcttagggtccagcattgtttgcaaatatatttttgattaggtatatgaaaactcgttgttatcaaaaagcaaaactcaagaggcatgcattaagtaataataattgaataaattagctcaatgaaaagttcgcaatattacacagcgaagcaatacgacaaacttatttaaaccaaaaaaccattaaaaaccgaagaaaaaagtcaatagccagaaagcaatctaacagaaacaatctacctagtttgtgtaaccaaacaacataaaaaggataatcaagaaaaaaagtgaaaggaagctaatcaaaaccaaaaccgatccaccttatttacattgctcaagtgtcgtgccggatattatgtgactatttttatgcgaaagcgatgtgtttcatttttgtgcaattgactgtaatttattgagaaaaatgttatagtaatctcttcaattcagctaaatgtgctaaaaaataaaccaaagacaagaagattatactgagtgtattggcgacaaattaactcgacggtgtttgcaattacattttgattttatttatgacaattttttcaggtatgaggaaacataaaaaaactatttacaaagtatagcattaaacatcattatcggaaggaacacaacacattaacttgtaatataattgtacctacttgtgcaatatatgtcagatatgta

SEQ ID NO: 771 - DNA, 3840 bp, Aedes aegypti
cgcgagtgttgctgatggtgaaagacgtcgtcgtgcgaggaaaaaatagtgacgacgaatcgaagtaggctgtggagcagagaagagtagtgtgtgatcctgatcctgacaagagccagatcacaatcaaccggaggaagggcgccacagaagaggcagaggcagagggattcgcttggaagccaacagtgcaagaacggcagcaaaagtggcagcccccgcagcagtatcgaagatgaacgaattcgtcgtggccggaaagtaccggatcgtacggaagatcggttctggttcgttcggagacatctacctggggctgaatatcaccaatggcgaagaggtggcactcaaaatggaaagcctttcggcgcggcacccccagctaatgtacgagtacaagctgtacaaggtgctgatcggcggcgtcggaattccacacatccggtactttggccaggagcggcattacaacgtcctggtgatggatctgctcggaccctccctggaagatttgttcaacttctgcagtcgccactttacgatcaaaacggtgctcatgctggtcgaccagatgattggccgcctcgagtacctgcacatgaagaacttcatccaccgggacatcaaaccggacaacttcctgatgggcatcgggcggcactgcaacaaactcttcatgattgactttggcctcgcgaaaaagtaccgggacttccggacgcgcattcacatcatgtaccgggaggacaagaacctgaccggaacggcacgctacgcgtccatcaacgctcacctcgggatcgaacagagccgccgggacgacatggaatcgctcgggtacgtgatgatgtacttcaatcgcgggtcgctgccctggcagggcctcaaggcgaccaacaagaagcaaaagtacgaaaagatctccgagaagaagatgtccaccccgatcgaggtgctgtgtaaaggcttcccggccgagtttgcaatgtatctcaactactgtcgcagtttacgattcgacgaggggcccgactacatgtatctgagacaactgtttagaatcctattccgtacgctaaatcatcagtacgactactcctttgactggacgatgctgaaacagcgatcgctgatgcccggcgcagtgaatcgcgcggaagaacggcgtgataaagataagcaaccaccaacggaaactgagaaatagaagttttgaaattattttttatgtataaaatatattacaattactaaaactgagtaaacttaaaacaaaacgggaatggcagaagaaaaaagaagataacaagaaggaacaaaaaggcgcgaatgcgaagagctgttacaaagcgaggaagaaggaaaatgaacaggcagcagaaagagaagcggaagaagatgaacagagagaaaacagaagcggaaccagaggtgcaggacgcggatacagaatcggatacttttttgctttgtgggcaacagagaaaggttataactgtgaagaagctgatatagttgagtaacacttgtaaacgaaacgagtggaatgtggcaaaacaaatcttgctgaaaataaaataaaacaaaaaggaaacaaaacattagcaaactcttaacattaattacaaacaaacaaagtatgtaaaattaaatataattattagtgattatgaattacaacaatatcggttgaagatgcggtggaaatggaggacggcgcgttttttcacggccggacaatggcacgagcagagccgaacatcaaacaacagaactgcacttcccgtctcggcttttttcgtgcgcattatccgatcgtcagccctgcgcatccgtttcacttcaagtacattcattcacacagactcatacatacgtacgtacatacagaatcaccatttttcgtctctcatggtctctcgttcctccccgttctctcaatataatcgtaagccacaactacaatcatgatcatttcacatacacatacagacgttcgttttatttccccgttcgtacatattgatgaaatattgctgtgtattactactacagataaaacaagaacgttcaatacgatgaaacgctattactctacaagtactactactacaaaatagcataaaacaatggaaataacaaaacagtgtttgtctaatgttttcgttttccgactctagtttttagttcaatacactcaatattatttgcaatcgaattttgcgtatttcttcaccataaaacgaaatgaatggagaaacccaagaatttaatcaattaagtaaaaaaagaaaggaacaataataaacacagccaatacaacaaagttaagtaaatgcaaaccagagcaaaaaagaaaaactctagaattagaaagggcctgctccgtgaccagtagcagcgttgtaaatgtgactctgtgtctgtgaatttaaaaaaaaatctactactctacaacaaacagcaacaacaatgcacattttccctctcctggaaaacgcttttctctgtttccgttgttccaaacacttattggaagtcgtcgtcgaatcccgtcgatccgatcgcttttggatttgtgtcagttttgcaatttggtccaaaccaccctccccccatccctcctcactcacactcacgagtgtgagcataacctcaaacttgttttgattgtttttattgttttcggataaaaactgttcaaaagcgccgccgatgcagaaaccaagttctcctgtgttagagtactagttcttgtactgtcgatagagtgaaaactaattagtaggagtataattgatccttctgtccgaatgttgtgtctttttggtatatgttttaggattaacatgttttcctatttttttctttcaccggagatctcgcgaaggagcaaaagaggtcactctatgcagcagcagcagcaacgtcaaacaatgcatagaaatttcgtttggagaacaaaattgtggaaaacacagaaattaattataaattaatcgaatatactatcaaattaaaagaaaaaaaacagaaaagaagaaagtaacaaattatgtgtaaatataaataattaaaaacaaaatgaaaaccatgagcaaaaagcgaacagacgttgacaagagtaagaagacaactcttctcttgaggaaaaactaaagttctagacaaaacaacaaaaaagaaaacaaaacaaacaaaatcagttttttaaactatattcaaaaacaaaaagcccaacaaatatctaacgactataattgtttaagtaagacaaataagataaaaatcccaaaacacacggacggaaaacagtttccagaatgcgatctgcagagaaacggatccgtaaatcctcctaaagggctctttatccccctctcaccggttctccggaagttcgattgacccttcctggctgcggtcaattggatccccggagcacgcccctcccctgttcccccacgcctcaaaatggtttgaaccaccctcccatccctcgttctcctcgacttccctcgagagaggctacacacaattacaaacaagaaggaaaaaccagaaaacagatataaatatgagaaatacatgataacaagaacatataaagtgtgcgcggttcagctaggagccgggccggccacaagaagaacaaacaacaacaacaacagcagtaaaagaaaaaaaaaggaagaaggcgaataaaacaagcgtaaatcagatacagtaggaaggatttattattaggaagtaatgattattatttttttcattgaatgaaggtaaaaatgataggatgatgcaagaagtaaacagttattaaataaagaaaacctaaag

SEQ ID NO: 772 - DNA, 1020 bp, Aedes aegypti
acttacctagcggacgatgccagtctggtccagtcgaaatacggagaatttttgtacaagcaccttatcctgttcgcccccgtggaggaattcggtggatcgttgagcgtcgaggccatcaccgatttcgtggataacggaggctacgttttggtcgcgggacgctcgaacccaagggatgccttgatggaattggcattcaagtgcgaatttgaggtggacgaggagaatgccgctgttattgatcatctgaactacgacatctcggacagtgaagatcatacattggtgggtgcttctccggagaatttgatcaattcggaaatcgtcatcgggaagaaatccgtgggcccactgttgtaccgaggaaccggtctgttggccgatatggaaaatcctttggtgttgctgcgggtagtatttaccgattgcagctatgttccggacgcccctatcaatgagtacccccacaccgttcgaaagagaacacttttgatcgcagccctacaggcccggaacaacgccagagtcgtattctccgggtcactctatttcttctccgtgtcgacggttcagcgtgcacaggatgaaaatttgcacaacaaatcggataaccaggatatggccacattcatcagcaaatggttcgcgttcggtcggataaaccttaaaaacacggttagaaagaaagcaaatcaaccaccagtagcttacacaatcaccgaaccggtcgtgaatgaaaccctggctgccgatggcaagtggcaaccattccaggtcaacgatatccagctggaattcgtccggatcgatccgtttgttcggaccactttaagcgatatcggtggtggacgcttcaggtcatattcaagatccccgatgtgtatggcgagtaagtttaaggtcgattacgatcgcatcggatatgcccatctgtactcgacaacgcaggtctcggttcagccactcaccctcacccaatatgaacggttcatcccaacgcgtatccgtactatgtga

SEQ ID NO: 773 - DNA, 1233 bp, Aedes aegypti
atgaacacacgaatcgacaacaccatcgttatgtggttcaaaaccaccaccctgctgtacgtccgggacaataagcactccaaagaccctcggctatcgctgggcagcgattactccctcacgatccagaacgtcaacgtggaagatgactccatctacaagtgcatcgtctacccggtcaacaaatccgcttacatcaccctgaaagtcagaggcccaccgtacaacgtgatgatcacccacggtaacaacgatcacaccaatcgcaatttggtgatccaacagcgcgatcgaaagtttatcatccactgtcgggcctcgggtttccccacgccactgatctcatggtccttccggggaaaacatttggacgaaaatcacgccaaacagaccggcatcaacattcgcaaggagttcctggaaattcatgacgtcaagcctcatcatgccggcgattacgagtgcttggcccagaacggaatcggcgaaccagtgagtgccgctgtgaacgttcagatcaaatcaatgccctcgatcgctaagcacatcgattatctgaacacggccatcggagacaccgccgagttggtttgcctgtaccacagtgatccgaccgccatcaagatccagtggttccgaggagacgagccactgcacgacagtgccaagttcaccatcagccgggatcaccacaaccaccacatgagaacacggttaaccgtcaaggatgtcgagcagaaagatttggtgacctacgtgtgcaagattacgaacaaccttggagaagcgatggccaagactaccctgggcttgctgccaggtgccgcccatctggcgaacttcagctattcggacggactgctgcataccatctggagggtgcgaagcgtacagcccctgtccgatctgcagatcctgtacaagggagaaaacaccaaatataccactatcgacgctaccatttcagagcagaacaaagaggaaaacggcgatttttggaacatcaaacgctcgatccggctgcccgagggcgaatggttcatcactgcccgcgccaaaaacaccgaaggttgggcctacacggaaaccgttcctctgcagttccaaatccccggtgaagtctcgctggagaaccgagctcccggaggcagctccggtgcttccatccgacaggtgtcgtccgccagcttagccgtgctggtcctccttgcggtgcttagacgaatgcattaa

SEQ ID NO: 774 - DNA, 1241 bp, Aedes aegypti
gacagaaagagtcggaaaacggatgtacgatcgttctcttgctagtcctaacgtggtgtaaagttgccgtgtttccatttgcctagcagtgaaaaagtagttaaaacccgggaaaaagcaccgaaatggccgacgaatacttttacggagcaaccttgaaggatggcaacaaaacggtgacctgggacccagacaccaaagccgaaggttacccgcgtacacacaagctgatcatcaagcagtgcatcctgggacacgaggctgccgctgatgagttcaacgtcgtgcaggtagagacaatgaccattcgggacaccctgcgcattcccatcgccgtgctgaaggttggcgaagcccggcagtgccgcttggatctggaattctccgattcgccagtcacgttcacactggtggaaggcaagggaccggtgcacatccacggacagcatttgctcggatcgctggtcgaggagttcgaggacatggaagagatggaagaggaagttccagaagaggaagaagatgacgaggatgacgatgaggagggtggcccacagaagaagaagcaaaagctcaccaacaactccaagggcaagccaggtggtcttcccgccggcagtaatagtgccaaaaacagcaaaaagaaataagcttattacctcctgaacaccttggaacactacgaactaatgcacccatacacaacatgactaacagcagcagcattcaacaaccaataggaattgtaagtcgagtaaagtcatttattcaatgcacagtaatcactcggagtaaatattataccgttcctttttcaatcaataaattcaaacaagaacagaggaagcagattgcttcctcgactaaacaaaacaatcctacatttaatattaaaacaaagtaaaacttagttcgtaagaaatcaccctttctgtccccgataccacgctgtgttttccgtttccgatgtatattttcctgtcggcgcctgcatatctgtatcccgggtgtgccgttttaaaaaagggtagaattctctgaacagcattcattcagtgagttttgactctacactgtagaatacctcttgaatatcctggggaagggactaatcatgacggccactgactatcatcaggcaggcaggcaatggcaaaaagtgtagcgaggaatatgaaagcggcaaagttagcggattaagaaggtacaacaaacgtgagaaaataaaaagaaataaaaac

SEQ ID NO: 775 - DNA, 3360 bp, Aedes aegypti
tgcacatgttcgattgcaccaacatcactttactcaatggttgaaaacaaatatcattgagcagttttttgaagctcatggcataagttatattcatacaataaaattacatcagtgttcgtaaaatcacgtttcgaatgcctcaagggagagcactgagctcatcgagagctctctctctcgagcgagcattacaaacagccgtcaagtcccacaacaaacggtaatcggaaccacagagcggaagacgcagctgtcagtctctccgccctttcgtccgtcacatcgtatggctcttctaccgtcagcgagctcgtacgactgcaatgtagtgtgaaaaattccgtaccgcgagtgagatcggtgtggaatattatttttacggcaatcttgccgtatcgcagtcgttcgtcggttcgcgtgtggtttgtggattcaagattttcgtataaaatcgactgaatcccttgcgtgacgtgccgggatttacgcagcgaagccatcatctaccagagaaacgagacttcctgacagctttgtcagcagtgagttctacggtagagccccctctaaaaatcccacccctcgctgcgccagctgtgtatatacagtgaatgataacaggggcgcaacagtggtgactatcattgccgccggcaccggggaatggaagacgagctggaagataagatcctctatcaaacgttcttcaaatcgcacatgaagctcctgtccaagttcgcagtcggcgtatcgccgctcaacagttcggtcggttacgtctggaaagtgatgcgcgtctatctgctcaagccggaggttctgattgccgggttgttgattttcgtctttgtgctctatcttcaagcgagcgaagtatggagccgaggattcatcgggaaaatcagcagcagtttcggcctctcgaagggaacccgttccggaaagttggcgctgctggcgtcggaggccgagaagcgaagctgggaggacaaacgcggcactagtgcagtgtacgccgtgcagggacgccgaccacggatggaagatcggttcgtaatagacgagaacatcaacgataccggtatatcattgtttgcaatttttgacggccatggtggagagtatgcagctgattacgccaaaacggtgttggttcgaaatttgaacatgaagttgacacaatcgtctcagatcgcctcgggaaaaattaccccatcaccggtgatatccgacctcaaggacaccaaagattgcgccaacaccaaagactcagacgacgaagtgaacgaacgacacaagctcaattcaaactccgtcacaactgtggccaatggcggcagttctttaacgcaacggaagcagagttttcggaagtccaaaaccgaagacatagtagacaaaacgagtggtggcctaggaggaactaacaataatggaaacagcaataacgcgaaccaacagctggagaccgatctgcttagcaaatatatgggcaatcagtcaccaatgcggcaactgacgaaggaaaatttactgaatggaacgacgggccagcagagcgccaatccaaagccaaaaacgtacgaagccaagtgctacgtgcagaatggcagtattaattttggcaagatcatcacagacgaagtgctggcggccgattacgatctggtcgagatggcgaaaaaagtttcgaacttcgccggaacgacggcactcattgcggtgatgcatcacacgaagttgatcgtggccaacgtcggcgactcacgtggcgtaatgtgcgaccacaagggcaatgtcatcccgctgtcgtttgaccacaaaccgcagcaagtgcgggagcagaaacggatcgccgacgccggaggtttcatttccttcaagggcgtctggcgggtggccggaattctggctacctcgcgtgccatgggcgattatccgctcaaggagaagaatcttgtgatagccgaaccggacatcctgtcgttcgatctggtggatcatcgaccgatgttcctgattttggccactgatgggttgtgggatacctttagcaatgaggaagcagtcgcttacatccgcgaccggttagacgaaccccactttggtgctaaaagtatcacgttgcagtcgtacaatcgaggctcggttgacaatattacggtgctggtgattgtattcaaaaatggacgatatcaaatcggttcatcaaacggaaactgaaccggatcatgtctataatcctctactgacccacttattttatagcacgtaattaatttctattacttgtacggaaaagctttttaacatgtcatagagaaaacgtaccactaggttcgtggtatagtgttttattgacttgataaagtgtgctgtgtttagttgactcatattatagtacgatctctcccacaccgctccatatacatagataaaagcatgtaatactgctaccagctttgtgctgggaaacctgatttcaccaggaccatttacatataatttctgctcgcgtaccaaatattctatagttttgtaacgtccttgtagctagtaagtaaattaggtagttaatacacaaagacacacctaaacgtataagatctgctaaagaagggaaactcattcgaaaaaagaacacatcctgttcatcctgtttaaatttacacgcttcccgggtgcagccgttaatgtctagctcgtaaattatttttattttgtgttctatttaaaatcagttccgaaatgcaattatgttagcccactaaattattttcgcttcatttcatttaaaaataagtcatttctcaatgcgtttgtctattaggaaagccatcttggtgcttatttataactgctgtactgtagtttcccatcaaaaagcgagctttcaatcacgctaatcactgtgcctgagtaaaaacaatcggataagatacggtttgtagaacacagtgccaaagaacagcctatttgatatggttgtaaggcaattcaaaagtaacacttggatcaaacataataataggcaaacattgtaactttcacttcactttgaccatgataagaacaaacataatgcaaggaaagatcggtttataacgcatcaatatgaacaatacaaaaaaaaaacagcaaaaaatgttacaatcactttagaaacaactattattgatttcaaacaatttgagtaggcgagattagaatctgaggagtagtcggaaatatctcacaaacgctcacggatttctataaaaaaacgatcatcgatattttagttgaaagagaattaggagattttgagataaatcaacctaacaatgaagtaaattgaaattttaatacaactgaaaa

SEQ ID NO: 776 - DNA, 1977 bp, Aedes aegypti; identical to SEQ ID NO: 406

SEQ ID NO: 777 - DNA, 4269 bp, Aedes aegypti
aaagggttctttaagcttctggacttttgtccactctatcttggacgttgtaaagcttaaatctactagagtcataaccttcgcaaccaattacacgcagaacgattatcatgttcttttagggaatttgaatgtagccagcgccagataaaaaactgaatgggtttagttttgaaatcacactgactccatacctattcctttcatccctctcgcaggagtcggcttcgcccggatggaatcgcgggaaaagtgcgaacagatcatccagatgttcaacgggacgcaactgcaaggcgcaaaggaaccgctgctagtgaagttcgccgacgggggttccaagaagaagaatcccttcaagagcccggatccgaacgcgcggacctggcgcgatggtgccgagggcattccggtgacgtacgatccgaacctacagcagaacggaatcggtatgaacgtcggagcccacatcagtatgccgtatggacggttcagcgctcctcaggtgggaagctacgccgtccccggctcccagtgggtaccgagtgggtacatgatgacccaaccgatcgcacaggtcgatgaccagcagtacgtgcagatgcaggctccacatcttagcgttggcacgccctacaagaccgatgctgttacgaacgtacagccacgtggcgtgtcgatgatcatgtccagtgaaaacccggcggctggtgtccaatacggcatgatgccgcagctcaccacattacagattggatcatcgtacatcagcccgacgtatccgtattacgcgccaacgccgtcgattattcatgcgatgcagatgggtgactcggagcaggtcagcacggcggcttctccggacgaggcgtacaccgcacagtatcaacatggtccgaagtagagtcctgccggatccggtgctacccgccagatctagagcgggtccatcatcacaaaaaaacaacagccgtcagttgaagaatcggaagaaatagaagaagtagtgtagtttccagtcatcatcatcgtcgctgattcgtcagcgtcgcaaaattcgccacctcagttgatcgaagcaaaaacgtagaaaaatcatagaaacagcctcagccggtaataacagccaaaccagcagtaatggttctaagtcaaggtaggagagatgttaatgtatttctgaagcgaggaacttatcggaacaactgaatgcaatgccaaacagaaacagatcgaaagtgaaccttgatcagtgaaggtccactacgacaattgacacgtgtagaggatcatgggacattgggggttttgaactctcaaagcagcagtgagagttgacaaagacacacacacatacacacactaacagactcgcgtaaacacacaaacaccacacactaaagaagcgaaaccgatacctcaatcgagacgagatacacataacgctgtttttacataagacttgaagaaactcacaaacaattcaaagaattccacgataacgaaatatcgcacttcgatgcatgggaagaacgaaaagacgtgtgcgctgaacacagaaggagaaggaattcgacctgcgtttgcaggattgcgtgtgtgttgaaagttccacattctttactagtactttatttgtttttgttcgaaatcatgatcaaacagcttagacctctaccatcgcgatcttcgaaagaagtgaaaaccaatcgttacaatgactgttattttttttagtattttctcacatttcttcggaacgttaagaaataaacgttgttcaatcgcccgaacgttgaaaatcctttttgtcacggttagtttataccgctggaagaaaataattaatcgccagacaaattcgtgagagcgtacgtgccgctggaagcaaacagaagagcgaaaacggaatctgctgcgaagaaatgtctcaaaacattgtgttaaaccagcaagcccttagttttgttttgttaagtttttacaattgtttttgttcccattttctcccctcttaagttccccaaggataaaatctttatttattactacacctgctctctgcggcagcagagagtaacgtttgttgcaagagagaaggaggagaacgctcgaaatgaaaactttagagaatgagaaaagtactgacacgattcgatttccttcattgcgaaatatgaacgtctaaatacatttacccatacatatacgaaatcgacgatgagagcgagaaaccaaataaaagatgggcggtagaaatagatttttttctcgaaaatggctttcatcattgtcgttttttcaacgagatgaactacagtgcagtgaaggcatgatgattccctaatttgaattttcctccggatggtccgatcgatcggaagagaagactagcgaagtatgcgtaggatgctagaagctacagcagagagaaagagttgctattttagggttaaattttaatttatttttgttggttaaggcgaagtagtggtgtggacgcggaaaagtttgagtttagggaacggtttgcgcaggagaagcagaggagaagtcttcgggcggctcggaagagacaaatagatcgcgaaaggagggaaatgcaaaaagaatgctagttcataattttagttcttagttcttagatagaccgatttgaaaatttacaatttagaagcaacctgaagaacccagagacacgacaaacacagtgacggatgagtgcatttcgagatgcgtaggaacactgcaaagatcaggtagagctaggagagatagggtgaaaatcaaaagagtagggatgagataggcagttttatgaaaatgaagattcttttctatgattttttttttttttgatttagttataattttttgtagctttaagtaaccagatactggaatgtttgcatggagaagaatgatgtcaaaggatagaagtagaagcaaatatagaactgaatgctagaagaatgaacgattgggtcagtaagggagatggaagagtaggagatctattatttttgcaatgaagtgtaacgccggatagagattggatgaagcaggaaggaaaccgaagaaggattgatgatttttttttgtttttgtagtagaatcttaacggtaagcacgaaagattttttttttctgaaaacgattgaataaagggtgaggcttgcacagtgttgcaagggaggttgcagggcattaaaagccaatgcactgcacagccctgccactggcaaagcagagcgattcaaacaaaaatggcaaaagaaattgtagttaattggttttaaattagtaatcgatgagattgctcttctccgttatgaacattactttctccattcttaccgaggtgggcaagaaatgagataatgacgagagcgcaatccaaactgcagaaagaaaacgtcccataagtatttgtatagtgaagtgaaaaggtgggcaagaaatgcactcgaaccgccttagttagggctctagttggtaatttggtgatttgggaaggaaattcttatttgtttttcatttttttccaaatctgtggatactgagattgtaagattcagggctaattactggtatctctttagagacttagtcactattttaatagtagtcatcaaagagtttctgtttcaaaaggaagatttcttaagtctctttttttggaacgcccagagattcccatgagactgttttaaaagtttttcagtaattccttccatcacagattcctctataaaaattttgagggacttcgttcggggaaatatttagtgacttatccagggtttcctccagagattcgttcatcaattctcccaggaatttgtgctaaaattgctccagtgatttctgaaggaatgcttaatttaaaattttctccaggaaatccctcagcagtcaaattctaccttcagggattacttcataaattctaacatgatttccatcggaaatccttccaataatccttctacagatttctccatttgttacttaaggatatctactaaatatttatacaggaaaaaatcctgcaaaatcaacaaaggctcattctgaaaattggattaagcaatacttcagcaaatactacaagaattctttgaggagttcctaaaggataggggattcatagggattcttccaagaacatgtgatctgcctagaaatggtccataaatttctccaggggttatttaacgggtatagggacaaaatgtcgaaaggcaaaacgtcgaatgccaaaacgtc

SEQ ID NO: 778 - DNA, 2637 bp, Aedes aegypti
gcattttccttgttacttcagtcgattattccgaagcagtgattttgtgatttggttcaaattaatattgagattatagagctgtgtctgctgaatatttccatggcaaatcgttaccacaaaggaggacattaatccaatttggttgtgagctgcggtaggagataacaggaaggaaggaaaaaaccttgatgaaatcatcgattctgcggttgtgctctcgaatgcaggcagttgacagagaatgtcgcagagtccacccaactacatggacggagttccggtgaagatttcggagcgcttcaaaccccctccgaagatcacccttccccagagtgtcataaatcgattggcacaagtccagagcgggggaacacttcgaactccggtcagctatgatttcgatctggaagcaaccgtacttaaacgaattaccgaatggcgagcagccaaggagaaggagcgttatgagcgggaggaacgggttcggcttaaggagttagaacggacacggctagcggaagaagagcagaagcgtaagttgaaccagatttcttatcccaatacggatgacctttccagtgccagtgaaggcgaagaggaaggttctgctgacgaaaatgaggaatcgacgccctcgggatcgtctgaggaacgaattcaaagtaatcacacattatcagtagctagttccaacgcagttcagcatagtcatatgaacaaattcgattcaattcttatgccaacggtgctcccagatgtggcaacgtctgctctagtgtcccctgaaaaggcaatagactccggcagcacgcctcttaacttcagcattccaaagaatacaaatttgttgaacaataaccacagtatctataacaagatcaactattcggatttcgagaatgacacttcgagtcctttcgataatatggagttgaaaactataaacgatttggacattttagctcaagtttataatttagatatttctcattctggtccagagcgaagcccagctgactccaatgaaaatgaggcaaaaaagaaactagaaaaccaatgttccccgaatcagaatcaagataatgatgtttccgttgtgcaaaatgcgaccccactgcaatccttaagctatcaacctcaatcccagtatcaacccacagcgtatacccaaagttctggtcaagaggtcctatcaaacgattattataaatcctacgatggttaccactataattatggtgctgcatatgctcctccctcttcgacgccctcgaatgccagctatgcgactcaggatagtcgatttctaagtcaataccagtcaactgcgggcacttcctaccagcagtcgacgcaatctcagtatcaacctttcaactattttccttacacgagttcctcgagcaattcagcaacgcagtccacctatgcaaatgcatatttctacaacagcacctatggacaccagtctcaactagcgcccaattataacaactaccccgtacaggcaaatgccacagcaacggaaacgccctcagccggatacaattccagtggagaatcttcaaagggcgaagacgcatcgtcattgagatccaaatctaaaagtgtgcctgacatagtccgtcaattggatgaggaggtgaaaaactccgcccagcgaagaactcgaaacaatagtcaatcggttgccgagagcaatccggcagaggaaaaaagtataggcaagtcagagtcgtccacgcaggactatacgctttacaatcggttgtcgcctaccgatcagaacctggtgaaacgcattgggtcgatgggtttcccattggagcgtgtagcagcggttctaacacggatagggaacaatgataaaaagatcgtagaacatctcataccattgagtgaattgctggacctgggtttcgaagaggagaaaatatccgaagcgttggtcaaattcgacaacaataaacacaaggcgctagattatttgatatcgtagtacctcagttattttctgtctgatattaagctaccactcgacgtcggtagcaacgtgattgtgattatagctgcgcgcagaaaacaaaaatcctagatattggctccaaattaagctgtaacttgttgtaataaaccaaaatcgattgtagtagttatttcatattccactttgaaacaactaatagaaggctttgatgttgtgatgccttgcccgctgacgatgaaactaggtcgtattttgcaaatctttatataaaactgtgcatctaactgcacttgagcacatgatttgcttctaaagtgagcttatcgtttgatcttattattcgccgctgcatattttttcgcttttattagatctgcgatacaattttcgacaatttcaatctttttaaaatagtgctttgtaccaaattttgttttataacctatcttgtcaattttctgttttaatctggtaggtatgcccttgaaaaaggatttttatatcggcagagtatttaatgaatcttgcatgcctaaccgcgaaaaacgagtcggtgagagaaaactcatgttctaatattgaatttctgttcaagtgcttatgttgattattacaagaaaaataaacaatattataaactactcaac

SEQ ID NO: 779 - DNA, 5130 bp, Aedes aegypti
gctgtggaaatttcattcaaatcactggtcgggcaagatccataaataactggtaggctttataccaaaattgatcatcgtgtatggaaaatcgcacaaggtacaaatttattgtcctatactgtatgacgcggattcgtattcgtattttgttcgatgaaactcgaaacaagcaaagaaatttcactgatcgtctattttggaacataggaacaatccaatctacgcaagtaaagttggcgtcaagtttattcgcatctggaccaattccgcttataacccgatctcattgtgtgtaaataattatcactaacgtaatacaattcaaaccggaaaatatctcatcaatggaataaatagcgacggagaatattttcaacgcatcatatagtgaatatctgttgttataattattcccaatcggaaagtgagttttgatagtgattggaagaactggcaaaaagcataagaagtgaatcttcgataaaaaagggaaaaagaataagctgccagtgagtgcccggaggtgtatgaaattatccagtgaatcgaaatcgtaagaactgcctcggcagagtatagtgcgcgatagttttacggtcgcaagctttctttttagtgatcaacaattgagcaaagtataggcaaggttagatacaaaattttaaagaagcggaagaaaaggaactcttccagtcatcatcaccaccaccaccaccaccatcaccatcgtcatcatccgacgtcaacggcggcgacgacgacgacggcgacggcaagtacaagcagtagtagtgaccaacagcaaccggaagatacgccgcaaccctcgactagcggcggaagcagcaacaactgtagcggcggcctcagcagacgcaacatgacaaccgatacgaggcgacgagttaaattgtatgcactaaacgcagaccgacagtgggacgatcggggcaccggtcacgtcacatcaaactacgtcgatcgagttaaaggtgtctcactgctagtgcacgcagaaaacgatggctcaatgctgctggaaagcaaaatccatccagacacaatttatcacaaacagcaagacacactgattgtgtggagtgaaggcgacaatttcgacctagcgctcagttttcaggagaaggcaggctgtgacgaaatatgggagaaaatttgtcaggtacaaggcaaagatccttccgtagaaataacacaagatgttgtggaagaatcggaagacgaacggttcgaggatatgtcggactcagcgccgcctatcgaactgcctccctgtgagttgtcccggttagaggacatctcggaagtgatcgccaatggactgacctcgcagatacggaaggacaaactagcacaagcgatagagagtgaaaactacattaaaaagctgcttaatttgttccacatgtgcgaggatcttgaaaatcacgaaggactgcattacttgtacgagattttcaagaacattttcctgctaaacaaaaacgctctatttgagattatgtttgccgaagatacgatcttcgatgtggtcggatgtttggagtacgatcctacggggaatcctccgaagcagcaccgacagtatcttaaacagttggccaaattccgcgaagcgattccgattcgcaactccgatctgctggcgaagatacaccaaacctaccgagtgcaatatattcaggatattgtcctaccgacgccatcggtgttcgaggataacatgctgaatacgctctcctcgttcatcttctttaataaggtggaaatagtcaccctgatccaagaagacgaaaaattcctcgacgatttgttcaccctgctaacggaccccaacacttcggacgccaaaaggcgggatataatcctttttctgaaggagttttgcaactttgctcagtatttacaaccgcagagcaaagaaacgttctacaaaacgttgattagccttggaatactgccggcgctggaaattacgctggctatcaacgacaagaagacgaaggctgcgtcgatcgacattttaactacgatcgtcgaatattcgccgtcgattgtgcgggattacacgctacagcagtataacaactcggacacggatgaggatcaaacgcttatcaatatcgccatcgagcagatgctatcggactcggaaccggaattaggtggtgcagttcagctaatgggcgtattaaggatactgctggatccggagaatatgctgagttccgtgaacaagtccgagaagtcagacttcctcaacttcttctacaagcacagtatacaaacgctgatagctccactcctgctaaacaccctgaccgaaaaacccgccaacgaagagtaccacacggtgcagctgctcggtctcgtactagagctactgtcgttttgcgttgagcaccacacctaccacatcaagaactgcatcttcaacaaggacctgctgcggcgaatactggtactgatgaagagcacacacacgttcctagtgctgggcgcgctccggtttctccggaagatcatcgcactaaaagacgaattctataataggcacatagtgaagggtaacctctttgctccagtggtagatgccttcgtgcggaacaacggccgatataatctgcttgagtccgccatcctggagctgttcgagttcattaagatcgaggacatcaaatcgttgtatacgtactttgtagagaattttggaaaaatcttcgacgatgtccagtatgtccagacgttcaaaacgcttaagaataagtacgaccaacaacaggaccgactgaaggagaaggagaagggaaacctcgatagtgtaccatcgattctgcgaaatagtaaccgataccggcgggatcagaggcagctggacgaagaggaggagatttggttcaacgaggaggaagactttgccgaaacgaacaaggccggatcgccggaactggacactagcctaggtaaaatcttcgacaagaaatcatcccccgaatcgtccccgtcagccacctccgtgaatggccccaagtacagtagtagtaatagtagcaatacgaccacatcgcaacaacagctatccacgttacagacgcactccacaccactgaacaacaacactgacattaagagtaatagtacgacattgtcatccgtggcggccacggccgatgatgaagaagaagattcgtccattcaccaccaccatcatcagcagcagtcactactaggtataactttggtcaattcaacgacggcgacgtcgtcttccacttcgctgtcggattcctcatccactggcgtcctggcggcggaagttccgctcgtcgattcgtcggcggttctgtactccaccactggctccgctggtcttgtctcgcatgaaacacctgccgcttctacgtcaacgacgacgagtatggacgatcagtcacctgcctcgacagaacccgtggttgacgaagatcccagctgtagtagtgttacgcaacttccacaaaattccacagtcagtgatagcgaccacagtgctgttgccaacagttgtaccagcacgtcgccaatttctactactgggacggaagccgttgaatctctcgataacagcaacctggaggcatcgaaacggctagctgatgatgctagccgggacggcgaggataacgcatcatcgtcctcatcggcatctgaatcatgtgaagatgtgaggcaagcggaacagaactgtaccggaagcgttggcgacgcgctggagggtggaaattcctcggtcaactgcagtaatggtgatatcagtggatcgtctacgacgatagccgccgtgttggattctgcgccggacgtagtggcaccgacggacgagacgcccagttccactgcggtcgtgagcagtcttaagaagcgtctggtggactacgagggcgattctgacgacgaggaagacgacgacgatagtgatagtccggctgtgaaaaaggccaaggtggcatagcatcttagtcacaaacaccatcgtcggcgtcgggccaaatgccatcgccaaccggatccacagctactgtccccccatagccacaaccatccccatcataaccatcaatatcatcatcacgacgaatctcgttgcgagtttgccgccgatgttgaccctagtggtaacaccgacagcgaaagcgacgaggacgaagatatgtctacgatgttatcagtctcgctagctgctactacacaaccacaaccaggaactgaaacaacaaattatgcataattcttataaatacatgtgtaactagaggtaataatttgctaatttaacgacaaccgagggcagagaaaaagagtgggagaatagtttaaaaaagaagaaaatcaacaaaaagatatccaaaaatcagctctttgttaaatcaaagatggagcagaagtagaagagtctttcggggcaagtggataggaacgataaccattttaattattatattgaataataattgaagctgtaatttaatgagaacaaaaaagataaagaaaaactgaataagattaagtcttaatgctataactaaacaaaaaaacatattactacaacaactgctattaggaggtgagatctagtgtcaaacttttccgaaggccacagatagaaacacaaatagaaacagtttcggtgtgttactctactgtatgtgaaaagtgagagatgctaattgggaagtataaaatttgtaaaacaatattattgttttgaaaaaatgaatcgaaaaagtacccaaaaaaacaggaaaagcttattttcaattcgaaaagaataaagctaaaaacaaactgacggacactgttcagatggtaaagaacgcaaagctgctaaattaaatgtaggaacaacagtttatcgacacttgacaaactcaacaaatttttatgcgatcaaaacataagatacttgaaacggcaagtcgctgaaaacgctgcgctatgctcgaagaatggaaaacagagcgagagaggcgattggaatgcgtttcacgtaactaacattggacatattcaaataaactaaaaaaacaacatcaataaaagtgtaattgaaagtggcgttaagcaaaggat

SEQ ID NO: 780 - DNA, 7549 bp, Aedes aegypti
atggcccagattgcattcataattttggtgaacaaattgaacgattcgcatgctcaactgattgtgcattggctgggcgaagggacaagcgtaatgatttgcctggctcgtgagcctccagctgacaacgatgccaaagcgccgccccctcaaccatcgagaatatttgtgtctaaagactacggagacacttttgacgatcaaacagagatgtttgcgctgaacattaacggtactgtggtaaactcaactgtggagcagtttttcacccatccaaagtttaatacgattgtcttcagtgatccaagaaataaagcaatatttacctccgaagattatggtaaatcggtaacggttcgaatgctgaattttacaccttccgatgtgactttttacgaggcggatactaaaatgatgctcattcttgacaagaaagatccagaacgcaagctctactactccacagattttggtgcttccttctcacttttgcaaagttatgtaaagtcttatatttggtcatctggtgaaggagtacccattcacctttacgttgagcgtaaagaaccaaccaatacatcttccgttattttctataatgcagccactctgcgcaacaacagcaatcagttcaacgttttaatagaaaaagtggaagatttccatataaagaaagatttcatgttcgcttcgcagcggttgccgaacagtacgcaactacttatttcctacaagcgagggaagtttgtcaaggcagacttccagaccgaattggatatgaagggttaccatgtggccgacgttgaaggacggcggattatgatctctgtggtgcatacggaacggatctcgcatttatatgtgtcggagacaaacgcggacatgacagaaatcaagttcgtacccagcctggagaacgtcttcacctacgtaccggaactgaattggcggtcgagttggctagttcaatcttctgatggtgcattcacggatttgtacaaggtggaaggattgcgtggaatttacattgcatcgaaaatcaatcgtataccgttgagcgaaaccatttcccctgatgcattggtgtcgctcattacgttcgatcatggtgctacttggcgatcaataactgcgccaacgacagatgatgacggattgcctatcaacaactgtgccaaggattgtagtttgcacctgtcccagaagttcagttctttatatccggtaacaagatcggtgagcatcatgagttcgaagtcggcccctggagttatcatggcttccggtgttgttggcaaatcacttaaaggacatcctggtgtgtacatttctcgcgatggtggtctaacgtggaagcagattctaaaggattatcactttttcaacatgggtgaccacggaggaattctagttgcggtgaaatatttcaagtccaagggtgagacgaatgaaatcctgtactctactgatgaaggcgaaaagtggatgtctacggacttccattcgacgaacttgaaagtttacggattgatgaccgaaccggatactaacacaactatattcaccctgtttgggtcggaacaggaagagcataggtggctcattattaaagtggacctaaagaatgcgttcacttcaaattgtaccgaagatgattacaagttttgggcacccggaacgaacgcaacgctcatgccgtgcattctaggactacaggagacgtaccagcgtagaaagccacatgccaattgttacaatggagtcgattatgaacgaccgattcgacaagaaatctgcaaatgtagtcgctgggattttgattgtgattttggattcagtcgaaccggaacgataaacagcccatgcataagaagtaaaactatcactaactatgatccgtatgcgattccaaccagttgtaagcctggacagtactataaacgaaccaaaggataccgtaagattgaaggcgatgtttgtattgagggacaggcatcacagtatgttccccaatcaattccatgcccaatggaggaaagcaacgagtttttggtcatagctcaaagagataagatctcccgcattaacttaaacaataaaactaaggaagtgtttccggtgactggcttgaaaaacgtgatagcgattgagtttgacatgaaacataattgtgtgttctgggccgatatcatgaccgatgtgattggacgccagtgcttgaacggagatcaaccgccggagcttttggtagataccggattgtcatcggtggaaggtatgtcatatgattgggtttcggaaatgttgtacttcgtagacggaatgcgattgaagattgaagctgtgaagactagctcacctgctcaaggtagaatgaggagaacaataattgaggcaccgaacttgaataaacctcgcggaattgtagtacaccctctgcaaggctatctgttctggacggattggaacgcactgaagccctccgtttcgcgtgcgaacttagatggtagcgatattaaaatattgttctccaagcccgaggttgtctggcccaatggtgtgacaattgactacatcgccgaaaggttgtactgggtagatgctagtaaggattacattgcaagtagtgacatggagggaaagaatttcatcaagattctacagcaagactcgcgtgttgcccatccgtttgcagtagcagtgctgaaggatctgatgtattgggatgattggaaaatgaactcagtttactctgccgacaaggatcatggaatcatgatcaatattattgccgaagaaatgatgaattctatggacctgaaaatctacggccattcggttcaggaaggatctaacgcgtgttcggttggtaataagtgctcacatatttgtgttggtgcgccgaattcgggttacagttgtttatgcccggatggcatggagaagaacgctcagggacaatgtctttgtccaggtggaggaacgccgttttccaacaatacatgtgctcgctccggaagcacctgtggttcaaagtttttcgattgcaaaaataacatttgcgttccattgatttacaaatgtgatggcgatgacgactgcggtgatcgatcggatgaggaaggctgtccttcggataaacctccgtgtccaccatacatgtttacgtgtaaatccgacaaacaatgtgtaccgaagtattttgtatgcgattatgaccgcgactgtctggatgggtctgatgaacagaactgtaaacctgcgtcttgcaagtcggatgagtttacctgtggcaacggacgatgtatcaataagagctggctttgcgatggagaagatgactgtcgagatggcactgatgaaaggaattgtaataagaatagcaccactgtcgtcgaatgtaaagcggacgagttcagatgcaatgggacaaacacttgtattcccaaactgtggcgttgcgatacagaacaggattgtaatgatggatcggatgaagcgaactgcagtagaaaggaatgcgaaccatggatgttcatgtgtgcaagcgatatgaggtgtatctataagacgtggcagtgcgacggagaaaaggattgcaaggatggaagtgatgagaaaaactgtaattcctgtcacgattggatgttcaaatgtgccaacgataaatgtgtgccatattggtggaaatgtgatggagtcaatgattgcggagacgagtctgatgaaacgggatgtaattcgactcaacctgtgacgagcacaacgataaaacccattcctacaaggaagaaggaacgaaactgcggattgcatgaattccgttgtgataacggggtatgcatttcgaagagatttgtctgcgatggttatgaggattgtgccaagggtgaagatgaagataattgcccaacgcaaaagcaatgcagcaacaaacattttaaatgtcgaagtgatggcatgtgtcttccaatggacaaatattgtaataacgtagtggattgcgcagatggaagcgacgaagattgcaaatttaaacccagcacatcaacatcgaccggaaacaattgcacaagcaatcccggtgtattcgcttgcgacaatacatgcttcgctttgatggttctttgtgatggaaagcctgattgttacgatggaacagacgaagatcactgcgaaaaaatgaaaacgaaacattatcaggttacgcaaatcggcgttgatgagcgttcgctcaattcaacaagcttcctgattttctggtggattcccctaccgcgtgatgttaccttggaatacttgccttccatctattacaacggggagtggaaaaacgtcagcaattggattaacgagacggactaccgattcacgaatttgaaaccttacaccctgtacaatgtgacaacatacgtgagagtgaaaacccaaaacaaaatcactcctccgtacatctattacgaaattgcaacaagtgaaggaattccaagtgccccttcaaacgtttctgttgttcaggtcaatggttctcggattcaagtgagctggcaagcacccaaggaagtgaacggccaacttcagggttacactataaactatcgttcgcagtcgaagaacgttggtccagcgcaaaatgttaaagttggtcccacggaaacaagctatcccatcgaaagcgaattcaaaccagacgtagtttatgaattctgggtaaaagcacgcaacggaaagcacgaatcagtatcctcgaatatggtgcagcttaagtttgacggtacatccaatgttgcgaaaatagacaaaattcaagaagtaaacaaaaccaagaaatccgtcacgttggaatggaaaccggttgaaggtgctgatggttacatgattcagcccattctacctcaatcgtatccgctactgaacacaatttgggtgaagaactcttcggtaacgctggataatatggtaccaggcacacaatatctgattaaagtagcagcgtacgtgaaacagtacgttggacgacatgaaacaacggtaattcaattcggcggagaaccgttgcctgctattaacatccgtttgaaggaacagactcaagaatattcactgttggaatgggatgaaccgcatggcaactacggcaagttggtctacggcgtgtattacggcacaaatatggatcaattatttgaagcatccagatttaacacgactgctaccagctacaaattgacaaagctacgaccatgcgaatcgtatgtcgtcagtgtcggaatcgtgggaccgatcggtcccggtccgttgggacgcaatccgctgaagttggataccccctacaacaacacattgccgccgaaagaattgaccgtcgatattagcggaactagtcataactcgtcagaaatgattatccagtggaagcatagctgtgcactggagtcatctagttatccaaagtacattataactgttcgagagcttacgaagaatatcacatcgtcggtgaatgtgccgtcatcggcaaacaaaaccctggtgcacgtgttccgcagtattccccgtggtgctgcttacgagatttcagtttcgaccaacgtttccaatgctcaagtggtatcagcggttgcctattctgcgcctctaccggctcccacgcggttgcaggtttggccagaagctaacggcagttacgtcgtctactggaagccagtgatcgacttcaaggatgttccgttcacctaccaagcggtagtatatgaaggaaagggaattaatacgacgattccacctttggcgacattagatggaaaagaaccgccattacttattaacccggatcgccttgttgcggtgccattagacagcatgttcacaatcggcgtgagactgaaaacagtggatggatatttttcggacattgtcgagacggaatactttgcgaagcacaacttccaaggcctcgtgcaggagtcttccttctccagtgcgtggctatggattgtgcctaccataatagcactggtgctagcgttgaccgtggtgtacgtggtccagaggcatcggcggttgcagacttcgttcagtcggttcgccaattcacactatgatacacgaacgggtgcgacgcgtattggtgacagtttggatgacgatgagcatgaacatcaagaggtgccacgaagtttctccgatgatgaaccgctcgtcatcgcgtaagtgggtaaaatactaatttccagttttttacgcgtagaaacagtgtagaagtaattgactaaaaacgcttgtgcaactttctgctcatttagttgaagatggaaggaaatttgtaataagttagaatgatagaaacaaattattacacgcgagtctggttcattcagactggactcgttttgtctgtgaacattgcatataacttttttaaatattaacgaagtttaaagtcctacaaacaaaagactagtaattgtgtatttatgttggttttattttgataggtttatttaattagttccattgtacatttttgaggttgtttactttgtatagaaaattacttgtatcatatacagtaaatgaaataaacaaactaagactagcaagcaaggggagatcgagatcagagtgaacgagtcaactgaaaaaatcagagaaagaaataataagtagtggcgtttatatgtgtgtatatttgtcgagataaaaaaatgaagatattaatgcagaagatttgtagtgactgtgtaatttgataagacactaggcgattgtaggaagagaaacgaccattgaaatacagctttatcgagaacagattcgctgacaggaggcttcagttgacaaacacacacaagtcagcactttctccattcagttaggagtaagattatacgattttggatgacttatagctatgtctacaatatagtccacggcatttgtatggagattctttgatcgacattcacatactcaaaccaaacatgtttcaggaacatcatgtcataagttttgttcacttatctcacgtagctttaacaactgagtagcaatgtttccgaggaaaagcaattctgtttaaagtctataattcgaaccgctagggtttcgtaaaatgtgctaaaatggaagaaacagtaaagacaaagattaatgatagttgataatgataacgattacaataagttactatgcatgctaaacgataacaaaccaaggtattcgcaagcgtttgaactgtgtttttcctcgtgattttttttgtttaaaatttgatgtagaatgaagtaaaatgagaaggtaaacattgagtggagtatccatggtgagaaaaaaaagttccataattttttttcctacgcaaatcttcctgctatttgatctggttgttttcctttattattgtgagtggttccaaaacggtgaaaataaatataagtagcgaaagaatatataataattcaataatgattgtaatgtaacaattcatgatccataaaactgatcaatgatgtgacgtgatcataaaacataatcttggaagactaat

SEQ ID NO: 781 - DNA, 4803 bp, Aedes aegypti
cttcccgagcccatttcgaaccaccggggcttctctccttcatcggccaccgacactgccagatacgcgcagaggccctttccgtcgtccaactgcttgcacgttacgcggcgcaagaaggcttcaacgagcatttgcttcaaggttccggcggcgggcctaggtgcccgtccgcccagcatcatcagcagtagcaccaccaccgacgagggcggtttcaacgaaccgtcgccggagatcaaagccaagcttaaaccggcctacgacttcgatgaagaaccccagctcaactacgccgatctgggctatcggttacgcccggatgggaccgagtgcgacgaaatctacggcgaggtagatcactatcaaagtgccaacagcagcagtattatcaccaacaataataatcaaccgttagacttaggccacggcgctagtagtgtagagagtaggaacgctattaacaatacacgatctcatttcaatcttactaacaacaatcagcaaccatcagaagcgatcaccgcaaatggtagctcgaacaaaccagacactgacgatgtgccaatggcggagatggatcgagtgctgtacgcttcgatcgtacccaaagcgaccggagattcgtcctcgaccatcgccagcagcgaactggccttcatggacatagaaaaagatgaggctaaaatcctggacctggatgaactgagcgagggtggtgccgaaaaaggttatcacagcccgcagactatccttgatcccacgaggcccaccttgagtgagtacgaggatgactacagcaacaaaacgctgccggatccgccatcgctgatttcgatgcgaccgccaccaatcccggagggacccccgttggacctgcaggatgttctgtacgccgatgccagcgataacgagcacgacagtttggtactgccggacgagatgacggcagacgaggccgagcgattgctcagctcaaggtatgtggctcttgcgcttagtcgcgtacatacatatgttgtagctaataggaatgtgtcttgcatttttcgcgcgccgtcttccccaaggcagcgtttgtttagctgcccaaactcgttgttgctgctagagcaaaatattttgttaatttatattttggagtacaaaatcagctcattgatgaattcaaaacagcagcagaaattattctcactttactgtcaatcaattacctttcataggcatttccatacattgcattcaactttatttgactatctctctcctaaactttcgtttttatattccgaattctcacgccaatccctaacttctatctcagaccaaccacttctctcggacgaacaagcccgcgaagtagagcagatcctgctcaacaacaaaaccaaagccgaaaccgattccaaccgaccgcctccgctgccaacggaatcgcttccaaccccaccgcaggaattccgtaaagaacccgactcccctccggctgtcacctcggcggaacctacccctccaccatcggctacagacgagccggactggctcaaagacgtcctagaagccccggtcaaaaatggaatcgctgcccctcgtgacaagcctcctcctccgccaccgccacatacaacgtccgcgaccaacggtttggaacctccggcaccgccaagtcgcaacaactccactactagtcagttcgaggagaccgccaattcgaccgatctgctcaaccaaaccattctcgattcgtcgtcgatcctgcaggactcgtacgtttccggtgattcgatgcccagtgtaaccacctcggatagcttgaacctgagcaaacaggaggaacaactcacgaccaacgatgccgaggctgacgtttcggcagacgagagcaacaactccggaatctacaacgcagagtacccaccggtcaagagcaaggaggtgttcgtaaatcaagacggggtccacttcttcgaggatggtaacttctggatggaggttccgggtctgctggagtcggatgaggaggaagacgtgcgggtgataaagaagagcaccaaggtgaagttcagcaccaatccgatgcaggtgttttcgacgttttcggtcaacgattacgaccggcggaacgaggacgtagatccagtagcggcgtccgccgagtatgaactggaaaagcgagtcgaaaagatgaacgttttcccggtggagttgatgaaggggccggaggggttgggacttagcatcatcggtatgggagtaggagctgatgccggtttggaaaagctgggaatcttcgtcaaaaccataaccgacaatggtgcggctgcccgtgatgggaggatacaggtgaacgatcaaatcatcgaagtcgatggcaagagtctagtcggcgttacgcaggcatacgccgcctcggtattgcgcaacacttccggtctggtgcggttccagatcggacgggagcgtgatccggaaaattccgaggtcgcccaactgatccgacagagcttgcaggcggatcgcgaaaaggaggaacgggtcaaacgccaactagaagattacctccgacggaatacggagatatccgaggactccaccctgccggtgtcggccaattccagcgtatcggagggcccaatcagcccaacaggggcaaccgcggaatcactgtttgaaacggaagccgcccgatccagcgatgtagaatcgctccgacgaatattgcaggaggtaattgattgctttttccaacccaacccgctttgccttctcatcaagtaccagcaaaactgtaacgaggcggagttgttggccgagcgaatgaagcaaacggaacgggagctggccaacatcaagaaggaagcgaacaactatcagaatatgctacagcagagccaggcccagtacgtcacgctggagaaaaagtacggccgcgtgaagaagattctgcgcgagttccagcaccgggagcgagatatgatccaattccaagaatactatctgcagcatctgcaggagaaagacactgaatacaacgcactggtcaagaaacttaaggaccgggtgatccacctggaacaggaactgcaggaaacccagcgaaaggccgggttcccagtgatactgccatacgatagtaccagcctgaagctaactcctcaaatgagtcgcaagcagccaccaaagccggtattccagaagctggaaaccgaactgtcggacacggaattctccgacctttcccccgatggcgaaggtgaagacggcaaaacggccaccgtcgagcggaaactacccacccagaaagacgacgaactggacacggccattcctcagcatgagctgttggacaactcgctgaacaaaggtaaaagtgatctggtagcacgtggcggtctatccaaacggagtcttcccggaaagaagagccacagcaatagcggttccgattgcgccttggacgaaagcgaggaggaaatcaccgactccacatcgatatcgcacgagtataccggcctctacagcaccccgcagatcatcaacaggcagctgaacaacgtcaaaaatggtcaggagaattctggtcttccggtgtacgctcaggtcaacaaggaccgcagcgaaaaccatcacagcgctgggcaaactcagcacacaaccattccgaacatatatcggaatccaccgtcggacaacaacaaactcaattccagttatgggtccgatctcaatgcttcctcctacgacagcgatctgggatcatccacagacaaactcaaggatagcggcgtgtccagtgacagttggatgtacccctcgcggaggcccaaaggactgaaaggcatcacgccgccaatgcttgcagaacagctcaaggaacgactagccgaaagacgaaccggggatgacggttcttcgcgagactctagcgacgactactccgaaatcaaccagcgacacatcagccctgccgcatccctatctcagaaccttctgttcgaaatcaaaaaagcagtcaacgaagcgcaaccgaaaggtaagaccatagtaacaatcatctgcgtgttgtgtaccttcagtgtgaattttcgtacgcttcgatcaaaattttgcaaccaaccagtttccggcaataagtgtgatgcatataatattgatttttgtcgctattgtaccaacggatataatcgtagttcttttggcgtttttctttctttctatttcactttctccactctttcggaatgcggacgtgcagtgaaaaacattcttccacaaaatctatctcctccaggaagtagcagcccgtggcaacagcagcagtcgtcgtcgccgcaagtcggccaatcggcgggaaccggatcgcagggacctccatcgccgtcgagtgtgtccagtgggtcaacgtcaccgggggcgtattcgccgagccggacactggacctgtcggggtcgacgtccagcttctcgagcgatcgtatccgggatgcgcaccagtggaagaatggtcctgttgagcagtggtctaccgatcagtggttgctcggcatcagcatggaggcgtacatcccggccttcgtgaagctccaggtcgagggcggagcgctgctctacctcgaaagggcagactaccaggcgctgggcatcgacggccaggaccggaagcacctcaagcgtaacatcaaggagctccggcggctcaacgaaaaggaacgcaaacagaaagaaaaggaccgtcgggagcgggaaaagctgattaagaaggcggagaagaaggccgagaaggatcagaagaagaagaagtaa

SEQ ID NO: 782 - DNA, 2833 bp, Aedes aegypti; identical to SEQ ID NO: 355

SEQ ID NO: 783 - DNA, 2938 bp, Aedes aegypti
atggacagttttctgggaagttcggaaagtggtgttccaaagaatttgggagaaatgtccaaggaacaattcggtgacctcataacggaccactcccgttttccgagtggtgaagaaaagtcggacatttcacagaaatttccatccgacgtagatctgttgggtgattcttttacgatgccctctactcatactgcgccggacaataaagtgctggagcaagaaaaagaaaacttcgacgacttcttcatgggggtagataaaaaggccaattctgaggccgcagcatcctcgataagtaatctgatcgatgttggcgaaccagacatgttcgaaccaaagaagaaatcaaataacgaaccagaaaagtctctgtttacggattcgactccattcggctcaggcccagatgagttagtgcatgtgaaagacgaaattgaaagtgactacatgaacccatacgccgaggttcgtcctcaggctccagtacaaagcagccagaaagtggaagaaccaccagctgttccagcgcagtccagcatcaaagatgatttattcgaggattttgtgagccatactaaggctgatcaattcgatgaccctttgttcgctgattcatcgtcgtcagctgctgcccccccggctgttgttgcccctgaaccagccccagcccctcccgttgttactcctgcttctgttgctcctatcataaccgcaccggctgaaccaccaaaagtaaagacccccgttgaaattccacaggaaaaaccgaaagctccaccggccgtcgttccttcttcctctggcaaaaccgcttccaacgaccagtgtattcaagctgagaaaatattcaaacaattcggattggatgcttggttcaaaccggaaaaactgcacccagtagtggaatccctgatctactggcgcgatgtcaagaagtccggagccgtgttcggcgctggtctcaccatcctgattgccatgtcactgttctcgctaatcagtgtcttctcgtacgtgtccctgctggccctgttcggtaccgtctcattccggatctacaaaaatgtgctgcaggcagtgcaaaagacctccgaaggacaccctttcaaagaatacctggacactgacctgaccctgtcgcaagaaaaggtacaacagctgagcacagtggccgtggcacacgtcaatgccctgctgacggaactgcgccgtctgttcctggtggaagacctggttgactccatcaaattcggcgtcgtcctgtactgtctaacctacgttggtgccatcttcaacggaatgacatgcgtcatcatcgcatttgtcgcattgttcaccttgccaaaggtctacgagaacaacaagcagtccatcgatgcttacttggaactggtcagaagcaaaattctggaagtttccgacaagattaaggctgccgttcctatcggcaagaaggccgaaaccgagaaggataaataagatgatttagtttatattttttaaagaacctctttttatttttttatttattgaactattaaccacaatgaaaagaatgaagtttaaactaaacgaaaaaaaaatcgaatcttttattcccacgcaaatttattgtttaaagtgtattcgttttaacgccaagtactactgatatgacccaagaaatctaaatactgaacgatttaaatttaagcagattaccaagattgcggataagaatgataaataaaaagataagattacctttccgttgcctttattttacctttgtgattactcaatggatcaaaacaaaagaaaactctcacacatagacaaaagtatgcgtagtagtaatagctgtaataatccaaataaaactcttcaaataagagaaaagaaatcgaatgcagaattgagattaactctcaataaacaagtttcaaacaaagtcaaacccctttcgaagtatcgttttgtctggagatagcagtaaagtagttcactcgcccacatcactcacccaactggaattcactcatcgatcgaagtcaacaccacaaactcggtttaaatgtttatcaaaacagttaagtattaaaacaagaaaatatgaggaataaacacaacacacacttagagattgatagtttttttggaaatctcgtaaccatcgttaaggttttagttgacaccccgcctccgtgttacagaatccgttttttccttttcttttgtgaggttgtgatcattgtttcgtgcgtgtgttgtttttcttttctgcaacggatcgagctaagtccaaacagaggtgaattcacactcacgcagacaaaggcattatgttggttggttgaaccaaatcgaataattttgcgacaaaataaaatgtgaaattgcttcagcaaaacaaatccaattcgcttaaatttgtgtaaaattattgaaacgagcaaaaaagtggctatattcatatttgtaattgtaattcgtataggagtataagagcttgtttgaagtggagcgaagcaaagcaaagcaacttatctaaaatgcaacaaaacacgcggcgttgagtctctataagctaattctgttgaaacaaagtaaaccctgtgcattatttaagcaacatatgaaatgcaaaaggtaaatatcgaatcttttttccgttactcgttatcgtaagcgtttgtttttagcctaaatgagcagaaaccatttttcgattcacctttttctagaagtaaattggagatgcaaaaaatcgtagcatgtacatgaaaggaacatcataagcacatacacgaagaaaaagaaatgcttaaatgaaaaaaatactttattattataattcattactgaagtgcgaaagtaagaagaaacaaaaacaaatatataagaattgtcatcaatgcaaaagaatgaaataataaaaaaggaagatgagaaactg

SEQ ID NO: 784 - DNA, 2127 bp, Aedes aegypti
atgtataaaatgcgccagttccaaaaggttttggaagacctcggttctcgagttgcatcggctgaaactttgattaaatcatggacttcgcccagttcagccactgatgcagcagaacagatgcaacatcttcaacgcctgaaagacaaaatgactactgcaggagcattgctagatgattgcaatgaacagcagagtttcttcacagcaaaccatgtactggtacccaatcaatgtcttgccaaattagaagatttgaatacacggatgaaattgctccatattgctatggatgagcgacataaggttttggtagcaggcggagcaaatcagccatctgcctccgatgctgatggtaacaagtcgatgcaaggtgttagcagcggaacaattggtccaattccaaatttagcaatgagtgtaaaaccaccatgggaacgagcaacaactccagccaatgtgccttactatattaatcatgagcgagaaaatacacattgggatcatcctgaaatgatcgagttgatgaaatccctcgctgatctgaacgaggttcgtttctcagcatacagaacggctttaaagctacgcactgttcaaaaaagactagctttcgatcggatagcaatgaacgttgccatagaatcattcgatcgtcacggtctacgagctcagaacgacaagttaatagacataccggatatgacaacagtcttgcactcgctatatgtaacaatcgaaccaatcgatatgccgctgatgcttgatttagccatcaactggatactcaacgtgtacgactcacaacgaaccgggcagatacgcgttcttagttttaaggttggcctaattttactctgcaaggggcatttggaggagaaatatcgctatttattccggttgattgcggatctcgagaaaaaggttgatcaacgaaagttaggattgttgctgcatgactgcattcaagtgccgcgacaattgggggaagttgcagcattcggcggttcgaacattgaaccatcggttcgttcgtgttttgaacgagctggtgtaaatcagaacggcgaactgatagagacggcaatcgaagcgcaacattttctcaattggttgcaacatgaaccccaaagtttggtgtggcttccggttttacatcgtttagttgcagcagaagctgccaagcatcaagccaagtgcaatatatgcaaggaatatccaattgttggttttcgatatagatgtttgaagtgcttcaattttgatatgtgtcaaagatgtttctttttgggtcgtaacgcaaaaaatcataaactatcacatcctatgcatgaatattgtactacgactacatcgactgaagacgttcgagattttacgagagctcttcgtaataaattcaaaagcagaaaatatttcaaaaaacatcctcgagttggatatttaccagttcaaagcgtattagagggagacgctttagaaagccctgcacctagtcctcagcatggaactcacacattacaaaacgatatgcactctcgacttgaaatgtatgcatctcgactggctcaagttgaatatggtactcgaagtaattctacacccgatagtgatgacgaacatcaattaattgcgcaatactgtcaatctttacctaataatggtggacctaaatccccagtacaagttatggcagccatggatgctgaacaaagggaggagcttgaggccatgattaaagacttggaagaagaaaatgcttctttgcaagcagaatatgaaaggctaaaatcaaagcaaacgcctataaccactccagatgattctcaaatggggcaaacaggaacgggtggaaatgtaggagacaatttggacatgatggctgaagctaagctactgagacagcacaaaggaaggctagaagcgaggatgcaaattttggaggatcacaaccgacaattagaagcgcagctacaacggttacgacaactacttgatgaaccaaatacatccaaagcatccacattgcaaacacggtctgttacggcatcgcaactcaatacggaatcaccagctaaactccaacaaaatggtcattacgatcagaattcaagtaagttcaaataa

SEQ ID NO: 785 - DNA, 1104 bp, Aedes aegypti
atgccattttcttttacattccaggattgtcgaggatcttttccaatcgtcaagtgtacgtactgtcgtacagagttccagcagaccagcaagggaagcaccgccgccatttgcaaaaaatgtgaccaaaatgttaaacagtatggaaagccgtccgcttgtgatctgtgcaacattatcgctgcattcattggatccaaatgccaaaggtgtacaaactccgagttaaagtacggaccagcggtaacatgcgatcaatgcaaacaacgatgtgcctttaataggccagactataaggtcgatggaaagctactatgctggctctgtactttgtcctacaagcgtgccctgaccaaggcacgccaagcggaaagcgatcgtcgccgtgcgaagaaacgtggagctgagggtggccctccaccggcgttgtcttcgtcggcatccggtgccgataatcgcagcacctcggacaagaccaatagcagcagcaacagcagttccatgaaccgcggcggaggatccagcttaccgccactgggtgatgtgagtttgggccctagctcccaccaccatcatcatcaccaccactcgaaatacgtcgatccgcacagctcggatcatgtcatagcgatgacacagctgaaggaaacgattgccacgctgcagcgtaaaatcaagcaaaaagatggtattattttggagaaagagaaggagatcagcgcatggaagggaaagcatttatacctagagcaggatttgatgaaaaaatacaaagatatggagaagaactacgagttcaagctggaagtgttgaacaagaagctcaaatcccaactgctggagattgcccagcttccccgtgactccgacaaagaagatgagaaggatgatgaaaatgataaaaaggacaaaaaagaaagtgagtccgataaggagaaggatgatgagcagagtaagagcaatgggtctgttaagggcggagaggattctgataaggaaaacgatgaaaagaaagatgatcagaaggaaacagagaaggatgaagataaagaaagcgatgaaaaggatcgaagctccgacaaaggatcccgtcaaaattctgag

SEQ ID NO: 786 - DNA, 3643 bp, Aedes aegypti
gttgtcgcgaccatatttgttatggcagcagaatttgttgctgcgtgaaaattgtcgataattccaccaaaatggaactttcccgtgacgaaagcgtgcgtcagctgtagagtgcggtcggtgccattgtttggcgctagtgttttccgcggagtggtgttcgttgccaacttagaagcttttttcactccatgttgattctggtcgccatttctgttgggaagacacacaaagatagggtacagctgcgacagtaactacaacaacaacatcaagacgagcggggtttggcttcggggctgagttccatttaaagggtattggttccagtgggaaacgtaactaattggatgcgtttgtagcgaagagtggaaatcgtcggcttgggtggtgtatgatatctttcattcagtacacgctgaatatcatgagcaatctaagcaatagtcacaacagtaacacaggaagcagccaaaattctgctgccgagggcacaatggagagaggaagttgtatcctggttcggtatgccagtcagaactcgcttgatgagagttcccagaagcagctaccgcggtcgaatggaaaagacaagacagttggaggagcctaccgtaacaatgtgcacacacagcgatcatttgaggcgatgaataatatgcgagaacaaaatctgctgtgtgatgtcatactggtggccgatggcatggagatacccgcacacaaaatggtgctagcctcgtgcagtccgtacttttacgccatgttcacaggcttcgaggaaagccgacaagatcgaatcaccttacagggtgtggatcatcgggcgctgcagctactgatcgagtacgtttacacttcggtagtcgaggtcaccgaggataacgtgcaggttctgctgacggcggccaacctgctgcagttgaccgatgtccgagatgcatgctgtgattacttgcaaacccaattggatcccagtaattgcttggggattcgggactttgcggacatccatgggtgcatcgatctattgaactacgccgagacgtacattgagcagcacttttcggaagttgttcagtttgacgaatttttgaatctcaccagcgaacaagtcgtaaatttgattaaaagtgatcgcctctctgttccatcagaagaaaaggtttatgaatgtgtaatctcctggctccagtacgatatctgcacccggcagtcatttctggctgatttgatggaacacgtccgactaccgctgctctcgcaagaatacctggtgcaacgagtcgaaaaggaacagctgctcaagggagatctccagtgcaaggacttcatcatcgaggcgctcaagtaccacctgttgaagggggagctgaaaacgaccttcaaaacccctcgaaccattccacggcagcccgttgggcttcccaaggtgcttctcgtcatcggaggacaggcaccgaaagcaatccgatccgtagaatgttacgatttacgcgaagaacgttggtatcaggtagcggaaatgcctacacggcgatgccgcgctggtttagccgttttaggcgatagggtttacgctatcgggggattcaatgggtcattgcgggtacgcactgttgatgtttatgaccctgttcaggatcagtggagtacttgtaatagcatggaggcacgacggtcaactctgggagtagccgttttgaatggttgcattttcgcggttggtggttttgacggttcatcaggcttgagctcggcagagatgttcgaccctagaacacaggaatggagactgattgcatcgatgtccactaggcgaagttcagttggagttggtgtggtcaatgggttgttatatgcggtaggaggatacgacggtgcttcaagacaatgcttggcttcggtggaaagatacaatccggctttggacacatggactcaagtatcggagatgacagatcgtcgaagtggtgctggggtaggggttcttgacaacattctttatgcagttggcggtcatgatggaccactggtgaggaagtcagttgaggcttacaatgcggaaactaatacctggcataaggttgccgatatggcattctgccgacggaacgctggagtggttgcccataagggtatgctgtttgtggtgggtggagatgatggaacgtcaaatttggcttcagtggaagtttacactccagaaacgaacacatggcggttactgccagcttcgatgagcattgggcgtagctatgccggagtagcaatgatagataagcccattcagaataacaaccaaaacaacgatgacgagaatagtcaagcggaagggctgaactcagaagctggtgctgtaggttataatcaagcttccaataataacaataacaacaatgtcaacaacaataacaatgtacactacgaaaacatttacgagtcaattgaacaatacgctgctgccgcgaatgctggtgtggctgcggttgcccctgccgttgctcaaaatccttcaggaatcattccacaaggaaatcctcttcttggtatgccatcaaatcaaccaccccaaccaggaccgggaccatcatcactcagtatgggacctcgtagcaataacgtccaaccgggagtcgtccctggcccaccaccacctccaagcatgctacagatgcagcaacaatatctatcattagcctatcgcaatgaactgtatgaccgaactgccggatacgatgtaccacgtggcggaggagttccacgcaacaactactatcaaaatcaacaatcgatggcgactggaccgcgttaccaaaaccttcatctggatctgaaccgaccaagatattcgcacaacagtatgagggcacctcgtcaaagaagttttgacgacaccgaatcctatcagtaccatcgctatcaaaatcagaactttgccaaatttgataacgtttacgagagagttcgtgaggaacctgcttaccaaaatacaggctatgtgaaccgtgccagatcggagagccctgcccgttcgggtacaaatcgccgagaagagcgtaacggtggggatcccttccgtaactgggcattcaattttgaggacaacagtttccgacctgccagttcagttccacgtcctcgtgaaattcgtcgtataactgatggaactttccgagccaccgactatcagcaagataatgaaagacttgggttgagtcgtgaagcacccaaaacccctccaactattgttgtcaacgcatcagcatctccttctacttcacgttcaaattctgcttcaccaccgaaaagtaaggaatcgtccgtatctccagtacaaccggagcgaggtggcactccagcgtcttcttcatctgattcggagatatttgtcatggattccgttgcgtccgatgctggcgggccagctgaggatagtagcgcttgtggtggtgccggtgctagcagcagcatgcagtgcatggaaaatatcggggacatgggagacacaaacgccacaaaagataaggaaggcgcttcatcacaagagacgtcggaatcatccaactttgaagataatgctgcggaatcctccggatccgatgatgatgtcgtcgatgaaaagaatgtggatattacttaa

SEQ ID NO: 787 - DNA, 507 bp, Aedes aegypti
atgtcccgcaataaagacaagtacgacaacaacaacccccggcggcagcagacctttctcacggcggaggacattgcggccggcaagaagacctgctggcatggcgtcgagataacgggtagtgtgcgcaacctcagccccacgctgtggaagttcgaacatctgacggcgctctacctgaacgacaattgtctgatgcggctgccgcaccagatcggtcagttggccagtttgcgtacgttggacctgtccagcaacaagctgcgtagcttgccggccgaactgggcgagctcatacacctgagggaactcctgctgaacaacaacctgctgcgtgtgcttccgtacgagctgggtaaactgttccatctgcatgtgctcggactgcacgggaacccgctcggaaaggacgtgatgtcgctctacaacgagcccaacggaacgcagaagctgctcacgtacatgctggataatctgtcagttttcttgaagtattcttgcccttaa

SEQ ID NO: 788 - DNA, 1795 bp, Aedes aegypti
aagccccaactaaagttattcgtcagaatgtggcacgaagtgcagctcgccaaggaggaaaaccgccgggagttggttctctcgggggctgccatccggaagcgattcgacgagaacgatggcaacctggacgagaccgtgtaccagctgagtgccctcaacctgctggacatcaacgacaccccactgaaggacatttcgcccaagattgcccaactggagcatctgcagtcgctgattttgtttcggaatcaaatcagttcggttccgggtgagattggaaagctggcggcgctgaaagtgctggatctgtctgggaataggattgagcagctgccgagtgagttgggccaactgaaggccctgacgacgatcaatctgtcggggaacaagctcaagcaggtggacctgagccagctggagtggcttacggtgtgcaacttgtcctcgaatcagctggaggagtttccggtgctgccctgcggaaaggagacgcaacatttggcggaggtaagattaatttttggagatgattcaagtctagggctggtagcaggtctctttttagtttttataattgagttggttccacagtttttggtcaaatgtgcaaagttgaaagaaatcaatctcaaggataaccctctgaaggacaaacgattgaagaagctggtggagcaatgtcgcagcaaacaggtcctggactacgtcgaaaagaacggttacgttgccccgaagtccgaaacggaaaacaacatcgaaaactctcttgtgaacgcagatcccactccagaagaagtggatgttcgacagcgaatcacaatcgtcaaagcaccggaagatgctcgaaaaatcagcttcacaccggaagcgaaatcgctacgaccgcacatggcccattgtatcgtgcggaatttcaacgtgggcaacatgaagaagttccttcaattgcaaaatgaccttcatgacaacgaatgcgcaaaacgagagctggccaccatcgctacccatgacctgtccaaaatcaagggaaatgtacgctaccgagcggatcttgccgagcaaatcgaaatcacccctctcggaggaaaggccaaaaccactgcggccaagtactacgatggattgaagcaacaggcggagattatccgcaaggagaagaagcgcaacacctactccggagtgtacaaattcatcaacctgctcgaaggcaaagtgttcgttttcttcgatgacgaggagaaagtgatcagtcttccaccgctgacgaattgcgacgagacgaaaatatccccggacaccaaggacatgctgctagaagtgaccagttccgcgagcttggacgtctgccacaaggtgatgttggccgtgatcaagaagatgctgctgatggatgtgcaggtgagccgagcccatcccgaggggaagaagaaaggcaagggaaagacctcaaccacagtcgtcacgtacgataaatcgacggagatggtcatcgaacaggttcgagtgtacgacgccgaagggaatttccactcggttttcccgggcaaaggggatttagcgttccccgaggaagagaagatcgacatcgaattgaagtaggaacgatttttacactgttttacctgaaatattttttcctgtactttcccacacgtttgttaaataactgaactagattccttttgttaacattttgcaacgaatgcatacccaaagcattagtacgagtactatattataaatgaagtgttgctacaacgatgctaagcattaaatgttttttctgatcatc

SEQ ID NO: 789 - DNA, 4595 bp, Aedes aegypti
attttcggagcagcgcagtcaaagtaggcagcggacactactcgctgtgttgtgtgcggattggatggtgtgagataagagagcgagctctgtgcttgcaaaagaagaaaagaaaaaacgtcgccttggttaaaaaacgcaccgaaaaaccgaaatttcccccatcttgtcgttgttggccgtcgttgaaagtggattctattgtgatttgatgaaacaatggcagtgtagaagtattgtgcgcatttgttgaaaaaataaaagttcattgtcgccgtggatgaagaaaaagaaaggtggttcttcgcctgctgcgtgaggaaggtgtgtgtttgtgtgggtaggaaagagttttttttttctgtttatttgtgtgtaacgcctgtacgtgtgaacaaactgtcaaaaaaagttcgaagccagaagaaaagtggtgcggaaaaaatagaaaataatgtacggcgctgtgtgaaacgagaagaagcagcagacggccgcagctcaagattgacgtgcaaaagaaaaggccaccatcaagacgacgacggctgctaaaaaggtggaaaggaggaatttttgcctctttttacggtacgtgctcgatttcgatgtgtgtctgaaagtgtggcggaggaaaatgtccgcaaaataagtgtcccgtgtgattctggtctaccggaagactgtccgtgtccgcatccggcgtcgttaagtgttaagtgtcccccagaaaaataagggaagctgctccaccacgttccgcggatattgtctccggccagagaaagtttttggggacacggctctgcagaagaagattttcaccttgtctctggcgtcgggacgcgagcgaacttgaaaacttgtctattttcggaggagccaaacagagcagcagctcctaaaaagcaggaggaatctccgaggagctagaggagcaggaggtggacaacattcaattgcgtgcgagatctctaagctactggctgcgccatctggaggaacacatcgccacctcctacattccgacaacggcagcaactgccaacaataataacaacaacaacaaaaacccaaccaagatggtcaacagcaatagcacctatttcatccatcctcctgcttcacaacagcagcaactcgttggtggatccaaccagaatctggcctgcaaaacaagcagtcaacaatcgctacatttcctcgcaacaggcccatggcagcaaattcattcgcaaccggcgcaacatcatcatcatcatagtcacaattctcaccaccacaacaacaacggatgcagcaccaattccggaagctgcaaccaacttccgcaacatcagcaacagtcatcgatttgcatttcgagctcgtcgctgttgtccaagtcacagcagagtctcaaccaagttgccagcagcagttccagctctagttcctgtcttgatagcacttcctcgcagctgctaaagaccaccaacctgctagccaatctggactggtgctcggacgtggtgaaaaagcaggaggatggcggcggtgggagtgggccatccttgatcggtgatggcaatggcaatcccggcagtgccgtccggggcatcggtagcgttgagaacgtttcgatgaaggaatttgtaccggttacattcaattactcaactccgcagggaaacaataaatccattgtgaatagcagtggtgccagcagtgctggtaccaccaccaatcaagccagcaagcaccatcacctaattgcgtcttctagtcaagcctccggtgtgctgctgggtagcagtgctaatggcagcagtttaaatcttaacggtagcaccggtttaggagctcacacggtggtactctcggatctggactcgagcgacgataatcatctgagctttagtaaaaatggaacggaaatattcgactacgattgtgattacgataacgaagaagaattcaattatttggcccgagcagccgccgctgttgccgcaggaggaacatcgtccaacgctgccaattcttgtaaatctggtgggacgaatgcggctggatccgctgcagttccgccatctgtttcgggatccagtggaccgaccaataccagcagtggaagcagcaatagcagtagcaacaaaaatcgagtttcgtttgatgctaacattagtgattacctacgagtccctcctattggacttggggaattcgatttagatggtagcggccagttgaaaaccagaagatctaacagtcttaccacaacggtaagtagtgcatgtgggctttcggttgggcaactgcatcagcagaagcagaacaacgaatgtttatcggcggaaaatctgagcaatctacaactactgcagaacaaaccgaggagtttctcgttaaccatggacagcccacggtcgtcgttaacctccagtggatcagaaactcggctggacgatttcaagcagcaccagttgatgaaaatatatggatctccgaatgttggcatgtctagcatagctcactggctgaagagtttgcggttacacaagtacgtatggttgttctccaatctgacgtatgaacagatgatggaaatgactgaagagtacttggccaatttgggtgttaccaaaggagctagacataagctggtattgtgcattcataagctaaaagaacggtacagtgtactgttacggttagagaaggacatactgaatgctgggggttctagggcccaacttagtccagtatttgatgaacttacgaatatcgtgttgactccgatgaaacctatcggactggaccagaaagaggatattgccgggttgtttgttaaattgttggacttgattgcttcgtttacattgacacggccgctctgtggcccacaagaagaggaatgcatgaatgttttcatttgggtgttggagcgggcgcttcataacgacgcttttgcggcccatactactcagataaaggagtacaagtacaaagcgaataaactgaagatggcttatgctcctaaaagccactacgctaagaataacggcattaacggaaatatgaataagccacggtggtctacaactatcaaacataaacccaatagtgcagctgatggccaaaaaacgccccaccgcaagagctccctgcagtattttactccaccaatgcaacaatcgcaatcatcacagcaacaatcgcaacaaactcaacaacaatcccaacagcaaaactcttcctcttctcacacacatcttcaagcaattccacaccaatactacggccatggaggtcataatcctaatgcaggcacgggccacaacaacaattacaacaagagttcgtcttatccgaactttgcttcgaacttatccagcagtagtggctctggaagcaacagcaccatcaaacatcacgtacagcatttacagcaaagtcaaagtcagcatccgctcccacagcaacagcaaccacaaccaccacagcaatcgcaccatgcccaacagcaacaacaatcgcatgtccctccacatggtaattttatgtaccatcgacattcgttgaacaacatttccgctcatcaacaccagcagcaattcttgcagcaattgcaaaaccaacatcagcaacaacagcagcagcaactgccagtgctgccttcgattttcctaactgcaatgggaggcggtggatgtcctccaacaaacaatggaaaatcccaatcgtcagaaacctcctgtcccaatcccaaaaactcgaccatgccgacgaagtccagtccagtggatctgctgggaagcaaaagccagaacaacagcatcggcgatataaatagtcggctagagtttctttgtttgcagatgaccgaacaggccatcaactagagcaccttgttggacagaaaagaaaaactagtgagtagtggtagtaattgttaaataggattgcgttgattaatttaggaataggtcgcgaaacgatgcatgcctctttctgcggaggcacgtagggatagacgacgatagaaattgtagattttttttcaaatcttgacgctcttcaagtctataagcttaaaactaaaaacaatggaagtaagcaaatcttataagcagataaagggattcctgtattttcaataactctatatataaactactcatctcattctctctttctctgatatacgcgcggaatgaggacgcaaaattaacgcaaaaaggtggaaactcttacgttgttgtagatttcttctcttggagacagaaattgattgttttatctatttgtatctgtttttaacatctaactttctgacgctagcggtctagataaggacgtcaaacaaaacaaaacgaacgatgtgaaaattgtgctgagaagtgtttcaatctacaataatcgataggagagcaaatgagtgctagggaatttttaattcagcaaaagcgggtacatttgaaagtggtagtattctctgttttactatttgtgtagcctttttttctgtcctatgaaattctctatgattttactatttatacaaatcgaaaagcctgttcagacataattttatacaaattgagtaaaataaa

SEQ ID NO: 790 - DNA, 3066 bp, Aedes aegypti
aaaaaaaggaagaggaacatagcatcgccaaaggaaagtgtggtcggtccagtgtgtgagtgtgtgtgtttggccaattcatccgacagagtgatccacaagcacatccctcaaggcagcagaaaaggaagatcgcttattccgtgtcgtcgtcgcagaaagtagtgtgaaaaacgacgaagaacaggcggcgcagtcccggtttcgtgaaacaacattgaaaaaggggagcaaagtcacagtcggcggaagaaaaatccacataaatcgtcctggtgttccaatcaaccgaaaaggctgaaaatcaactgttggtagttcttgggaaatggtaatggaagcacaaccttcaccgcaaagcgttggccgcgagttcgtgcgccaatattacaccctgctgaacaaggcgccggatcacctgcaccgcttctacaacaactcgtcgagctttgtccatggcggtttggatacgaagaatcaggaagccacgctggtgatcggccagaagcagatccataacaagatccagcagttgaactttcgcgactgtcatgccaagatcagccaggtcgattcgcaggctaccctcggcaacggagtggttgtccaggtgaccggtgagctgtccaacgatggacaaccgatgcgtcgtttcacgcaaaccttcgtgctggccgcccaatcgccgaagaagtattacgtccataacgacatcttccgctaccaggacatctactcggacgacgaaatcgatgagaacgatcgttctggcgaggaagacgccggtgaagtggacaccaacaatgccgtggtggatcaacagtccgtgcaggccaatgttgtcgcttctgctggtggcgtagctccggctctcggtcagccgcagcaacagccacaacaacctcagcagcagcagcaacaactgtactatcctcctggagtgatgagtgctgcccctaccggtatcatcccaagctacggtcaaccgcaacaggctcaacaaccccaacagcagcagcagcaacaacagctgaatggagttcacgacgatctgctgaaaaccgtcccaacccaaaccactacccagctgatgcaatcttcggttggtgctgtccctcagcaaaacccgaccgcagtcatgcaacaagtcccaagcgtcgccaccggaatgccaacagttgatccaatccaacatctcgcccagcaacaacaacaagtggtccaacctcagcaatccacccctcagcaacttcaaccccagcaaatccaacaacctaccattccacagcaaaccgttccccaacaacagcagcagcagccacaaccaaccccgatcgccgaaccggaaccgattcaaagctctctgtcgatgaacgaactggactccgctttgccctcgatgaacgacccaacccccgccgaggctagcgattctcatgaccaccatcatcaccacggccagtcggacctgaacgatcagcaacaacagcatcagcagcaaactgtaccgcagcaacaactgtccaacgagccgaaaacctatgctaatttggtcaagtctggcggagccggtggtcccggaccgttgagtttcgcttccgtttcgtcccatcaccaccaccagcaacagcagcagtcccatcaccagcaaggctacagcaacgttgccgctggacgtcaaaccgtaatgtcgccaccgccgtcgtcgtcgctgcaaagctccagctccaacaatggtggccccacttccggaggactgggtggcgccagcaagtacgatcgcagccagcaacagatgtcgcagcaggaccagggcatgggcgggcagggaccgatgccccagcgaatgcaaaaccaacagcgaccgatccgaggcaatggtggcccatccagtggtggacagagctctctcagaccgcaagatagccggccaagctatcagagaagctacaacagcgatggcgaagatcgtcgccagcagagcagctcccagttcggagacaaccaccaacttttcctgggcaacattccacatcatgctaccgaggaggagttgtcgtcgctgttctccaagtatggcacagtcgttgatctgcgcatccactcgaaaccgggagccaaggttccgggagtgcgtgccccgccaaactacggtttcatcacgtacgaggatccctcctcggttcagagctgtctagcggatacgcccctgtacttcccggataactctcccgatggtcagaagctgaatgtggaggaaaagaaaactcggatgcgcggtcccggtgagactggtggccgtatgggtggcagcaatctcggaggcaacggaagcggtggaccacgtggcggtcccggtggccctggaggtcaacagcgtggaggccctggtggcccacagggaaatatgaaccgtggtggttcgggacagcgcggcctcggtggagttggtgccggaggtggcggtagtggtcgcggaggatatcagcgatcagatcgaagcagcgtaaccggaggtggtcagcgatctggcaatggaaacgtaagtagcaacaactcttacgggggcggtcctggcagcacctacggaggacgacgttaggacatagagacagacagccatgcggctagaatccaacatttagaaagcaaacatattatcattttactatcgactcgaaatcatatttgccaatctctctctatctattattgaaacaagaagaaaacaaaatgcattacacacacatacatacacattaatacctaaacaatcggccgtagcgagagtggctatgactgctggtttttgaatttttcgttttcttttcgcgcgtaggatgtgatatagttctatattgattaacaaacaaacaaaaaaaaaaacattaatgagtaaaactgcagagaaaaggaaaacaatatgaaacgaaatcatacaacaatgaatttgtgttcccgctattcacttttttctagtcctaaaaagaatagtaatcgaacagacaggtgatgttcccaaggcaaaaacgatgtaacacaaatggaataaaagtacgattttcc

SEQ ID NO: 791 - DNA, 3706 bp, Aedes aegypti
cagttgctttcgatcgtgtcggacgtgcgtgagtgactactttttctgatttttggtttctggctgctggcttttctggattcctacagcgaaaataaacactcaacaaagttttggggaatttccgtctctgcctgccattcgcgtcgcgtcgaccactgcaatcctccgtaggtccgtccatctcactgcaggatcacggtgaaattcgcggcgcgagtgtagtgccaatctggtggaaattacgtcgggaagtctctggcttcggattggaagtgtgctgttgctgtaattgatgggggaagtccctgcgaagtggattagggctgtttgtgaatttattgtgtgctgaataggtcaataatttgcctggttccgactgtgagcggattgtttatccgtggaatcggaaagttcctatactagtggagacaagcgaaagtcaagaaaaagtctcaggaggaggagaaggaaaatatttggctcgtgtcacaagtggcatagaggaagtgctttgtgagagaaagaagctgctgtggcatgggaaattaaaagaaaaaaaaatgacagcaatcgtcacggaaggtcagatctgaaaagagctctcgaataaaagttacaggaagtcaaaattttggggggctattgtgggaatcagtgcttgaaggaagcatcaagaaaagagcactacacaatggatacatcaaaggagacagaaatggatgaaaacaccgagctggatccgagaattcagatcgagctagaaaatctcaacacagcaacggatgatattaacaagttggagatcgagctggaggaagcaaaatcaacctttcggattctgatgaatgaatccacccggcggctgaagctatcgtccaagaaactgggcagctgcatcgacaaggcgcggccatattatgaggcattggaaaaggccaaagcggcccagctggaatgtcaggcggctgcgatcaagtaccagcgggcaaacgagatccatgcggcagcgaaggaaacggtggcgctggccgagcagcggttcatgagcaactcccacgagtggcagttcgataacgcctggcaggagatgctgaatcacgccacgataaaggtgatggacgccgaaaagcaaaaggcagagagcggagccgaacatcagaagaaggcaaaagtattccaggaagcagaactgaaagtacaacacttggaggagcgaaaccggcgtagtatacagaaatcgaggccatactttgaggaaaaacaactgtgccaggaacagttggaagcacagaagggacgtatccagcagctagaggatcagattgttgcagcgaaaagtgcctacggaacggcgttgcgaaatttagagcaaatcagtgaggagatccacaagcagcggggtgacttgagtctggcagctccgtccgggcctcgcgagcctggcgtgggtgcagaattatccaacctccctccgacgacgagctcgatgaagcttagctcacccggtgccagcagttgcagtaactaccacaacttcagcagtaatatgccagacatatctacagagctggacaaatgcgagattcactcggtgggaagtacttcgttggcaactagttccgctgtcagtgagaaggaccctactgacgatgactatatgaacgacgcagatctgaatctggaattgctccgccagaaagtgaaaacactagccgtccgtccagtggaaggtggcgatggccagcagcaagagcaggatgtctgggagcacgagctgaatgctaccgtcgacaaactggaccaccttatgatgctgcgcgagtcctctgccaatagcttgagtggatcatcgctggtcgacagcaatcaagctaacaactatgccagcctgccaaccaccccgaaacatcaccagcagctttctccggtgctggcggagaagcaaaaaattaaaatgttcaaaaaactggatcctcttccgcttgccaacgtttcaatgtatgcgcttccaacttatctaagcagtagcggtagtgggatgactcctgctcgcacgggtattccttcagttcctatgggacacaatgatctagtgacgcctcgtaacgagaccgtagctcccgttattgggctaaagagcaaacggaaaatgtccatgtaaaattaatggtaactaaattatttgttaagcaaatcttcgactgacaacatgcaaggacggggattaacttttggttaaatcctatccagattctctggagaaggcacggttccccggctaatatggtcgtgacatactaacattaacgttattttttaacaatattataagtccattcgctccgggctttttcgtatattttgttcattttctacgttttactagaaataacgaaatgaaatgaggtagtgacgaaactcgaaagacatatgaagaaacatggcaaacatgatgatatgttgcctctgttttcaactatttgctcactacgggcttttgtacatacttacgtgaaatattatttttagtaatgtgatatatgtatctttcaaacaattggcatttatatacttgagttgcacctttcacaatcttactgattgtttcaatatattcattctattttttctatatatcttgcaaattgtattcggctctcgacacagttaccttaggaagcaatctactgctacactaaagatgaaaattgatacactttgttcagtacaaactcggaacgtatacctacttaaagtatacaagcggtagtaacattgcaacagaaaatacataatagtaaattgtaatgattacagaatgaattctatattttcaccacaacctggttttagcaaaaataaaagttctttagaaaatgaacagtagggcaaaacagtatactgttttgatagccaacacaatcgaaagacataaaattgtaggtgtgctttcgtcctctacacataaccaatgaaaatcgaaagcagtgaaaaggcttcagccgaaatgaagtaaagctttattactattacatcaagataaaagaaacattgatcacacaacttacatttagtattcaaaagaatcagtttaatcccagccactcgccttcaatttttcgattgatttcaaagatgaaatccacccgatttatgtattgttggtacattatcaagaagacaagagttttatgagtgcagtatcatagaagaaaatatatcgtttttattttgttgaacatgagagaactaaaacgaagagttgaaatggtttgatacgtttaacagactttaaagtagcataaggtaaaacttttaaaggtgaaaatttacggtttgattttatgcatctaaataaacttgacagcggatttagcgatgttgaaaaacaaaatcttcttcaagttggtcaacctactttggcacttctctggttcactttggcagggtggttttgataggtctgaaacttagctataagatatatttgtgtatatagaatcttgtgagtgatttttgactgtaaagcttaaaaaccatgccaaagataaccaagatagcccaagaataagacatgtttctcaatgcttgaagaggattttcctctgaaatcggtgaaaatttgaaccctgtatggtatggtttatcgaaaatttgatccacccgtctgtaaacatgaaataaaaactatattaatgcgtaa

SEQ ID NO: 792 - DNA, 3051 bp, Aedes aegypti
atggcagatagtttagttgaggctccagctccgagttcgagtcacttgatgaatttgggtgggctaatagcggctgatttacaaccgggctcgtcgtccggtccttcgtcgattccttcttcctcgaccgcttcggtggtcgcctcctcatcctcgtcatccacttccggtggtggacagccctcgacattattgatttctgtggctactcagccagctcacggtttgaatttgtccgagcaaatcatgaccagcagccaagagctgaatcttagcctggggaacagcagtagtggcaatggtggaagtgccaatcagcagcagcaggttggggaatctccgaaggtcacacgcccatccgagcactcggatgaggatgagccggaaaccaaacgaaagaaaatcgataaacccgtaacgaaaatgatcgaaaagttggaatctcgcctcgggggcatcctgtgttgcgccgtctgtctggatctgccaaggaccgcaatgtaccagtgtaccatgggccatctgatgtgcgccggatgcttcactcatttgctggcggatggcagactgcgtgatcaaaacgcgacctgcccaagctgtcgtaccgagatcagcaagaacacatcatcgcgcaacttggccgtagagaaggccgtctccgaactgcccagtgggtgccagtactgtggcaatgagttccccaataagtcgatcgactaccacgagagcaatgagtgcgaagagcgaccgaccgagtgcaagtacgcccgcatcggatgccaatggcgcggtccgacccacgaggttccctcgcatgaaaccaactgcactcacccgaagaagtccggagctgaggtcatgatagcactgcaggcccacgatgcccgggcagccgaggagaagaagctttttctcactttgattgatctcttgagctacgagaaaattatcttcaatgacctccagatgaagccataccgtaccgacgagtacgtgcatcgtctgtactacgaaacgtcccggttttccgcgttcaatcaccaatgggttgtgaaggcgatcatcaataagagccagcgtgatccccaccaatcgcgcgaacgtgatatcacctatcagttgattctgaaatcgaaaaccaccagtccgctgccgatgcatttcttcgtgttgcggggcccgttctcggacatcaaggttgatacgcagatctacaagcacgactttacagaaaccgagacggagagtccgttcaagctgctgccattgccggatacggccgagtgcaatcgattgctggcggccaaggcgatcaatttcaggttgataatgtttttggcgtccaagtaatttccccgtcgcgagaaattatacgtgatcagtgatggtaacagtatgtgttgcatcaacatttgctactattattagtgttattatgggttcttttactagcgaacacgcgcagcatcagacagagcagaggaagaaaaattaactttttttttcgtttattatgtaaaactttacaacaccctacttaataagttgtcagcatcgatagattgggttgaattttattgatcggttttactttgaatgtctctgctattcgctcgcatatgatcggaaaaccaaatttttcagttttaagtgcttgtaacgtacatccgtttatggtagatgattttgttttaactctctagatacaaattcagtcacagcagagctgtgatcagtggaaatgtgtcttttattatcgcacaacattttattaattttattttctacatggaatcaagcattttggaatacgaactactgctcaccgcaaacagattatttatctaataaatatagtgagtaatgtctaggataaattatcaacattttactcttacagatacacatatattaatagaccgagacaaaaaaccctcccctgtacattaattgactcataggataatcatcgacatacagtacgttgttggaaccgattgcaccgttttcctagattgattccaatccgaaaacagataatcgtagtacaaaatcattttagaaaaatttagttatctctcaaatcccctattcccaatggtcgtgggcttcaatttcagttggtaatcttatatcgataaaacccgaatcgattgccatcctgtataaatagatactgcatctaaccaagagcgccatatgtattaaacttgtttttgtttgaacactaaatttagttgtccattactccgattctgcatctgttcgctaactaaattgtgtgataattaaatcgaatagttgaacttggagttttccgtcgaatagaggcagtgcgcttattcgaaaaaaataagaataaaactttttagtcgtaaggcgtacaaccagagaagcaagggatccatctaagtttccatcgtagagttaagacggtatgtgaaacaaagttcgatcaaaaatcgtgaaaacatatttatatttaattgtactctgtaaggtctcaccatcgtgtagtgataataattgtaacgcattacagatgcaaattgtgtataaacgatacaatgaatcgaatgtaaaagtacctacgtaggtaagtcgttactttctccttaccacgcgcgtactttactgattgcaatcggtcaggtaccgccaagtgcaaaccagcagcagcagcaaattagcgagacagccaatgagcactaaattagtatgcaatacgttttattctgatccgctaataatctcttcgaaaatcaattacaaagctagcgttgtaaggaaaggcttacgtcgtatattttaggattcgttatttcaaagagtggcatatgcaacatacggatagataaaggcaacacttatacatttttgcttcagagatatacatgattatatttatatagattgctgtaaaactagtagtaaggacgcatgtcgtttgtaagatgtttttctctaatttttattcctttaccattatcgtacctttttggtaggtcgttttgtttgtcttctgtaatgaacttatcccttattctagtt

SEQ ID NO: 793 - DNA, 2096 bp, Aedes aegypti
tttctttagataggtacctgtctcttatagtgattaatgctaatgaaagtggaagtttacatttttgttgtatcttgatactgtacatggatgtcaagtagaatgatgaatttattttttatccttatggcttagacaattctatagttgttataccggtagtttacctgaaaacacctaaaaataatgtctaaagtaatctcaatgtaatggctacaaaatgtaataagtattcttgatgactgacgctcattatccagcgaaaaaaatagcaacaagctaaggatgtgacgattcggctatgaaatccatattgtaacgtttattgcattgagcgaatttgggtttttcccacaatttgtcaaacgaggatactactgtgacgatagatcgattcaacgttcgttcacgggggataccgtagccacaactgcgattatgctgagtggatttgtacctctgttcctgatctggttaactgagataatattctattcatcctcatcgtcgtttatatgtagcagctctagtggtaaaaaaactcggtgctccagctcgtggagtcaaagctggtattggttcaaaaagtacggcaaaggtctcatactaaagcttttgattgtggatataataaagaccttcgctggcgaacatagacctcactttatagaaacttgtctaccggatatcgtatgtgaagggagcgaatacgtttctacatacacctgtacaaacaccgaatatcgaccttacttcatccgagatgctagcaagtcgtttccttccgggcactcctcgatgagtgtctacggatcgcttttcatgatatggtacttgcaaaaacgtacaccgaagatcgcttccgttatagctcttccgttgtgtcaggttgtggtagccacgtggggaatattttgtccattatcacgcataatcgataatcgtcaccactggtgggacgttcttgccggagcgttcattggggtggtggctgccgtcttgacgtgctatttcagttgccacaacttcgacaaattaagactgaggggaaaagatccgatttacaaagatcacgacatcaaccttgtttccaataacgtgcaccgtcaaacggcgtcaatggaacaatcaattcctaaacacattaccaccgatttagaatcgtactagaaatttagaaacttacaggtattaaaaactgtattacgttgtctacgaatttacacacaaatccataggattgtaaataggaaaagttcaaaacgtgtgatgtatgtttgcgaggacgtattgtgatattaggactagcccagtgagattgtttggtaatcatgcaaaaacgtactgcgctcatatgcttctactacaaaacacagaaaatgataccggaaacgcagatcactgcatgaaaagaatagcaaacaacataatgtcgttgagttgcgttgccctgcaaaacgtgtaccggtgaaacctaaaaccaacttggttgttcaggagaaaaaccgtttcatcagtattaggcaagtagaacattgtttcgtacgtggcgaaaaattgtttactgtcccgtttgagaagcactgtcatagtagaagatagaatgtagaagcacgcgagtcaaatgttaagaagaataagggaatagctggcgtattaggaagcatgcggttgaaccagttgcacttcgcagatcgtgtaattgtgacaaaaaacgagtaggcgaaagtaaaccgtacccacacacaaaaaagttttaatatattgattttacaacaacttgaaaagaacataggtaaattatagaaaagcacgatgacaatgttgaataattgtaagataaaaagctttaataaaaagaaataaaaaatatgatgtcaaaattcttgttttcttttcattttactcacattatcttttatataaataaacccaaaagttttacattttatattgtctagggttaaaaataaaaaaaaatatgggctttcactaaaaacttaactcttttgaacccattaacgcccaagcgtctcacaatcggtattcagtttcatttcagtccacttgtttccatacaatacagtcaaccctcc

SEQ ID NO: 794 - DNA, 17643 bp, Aedes aegypti
ggaaaatttggaaaatcgcgaaacggaacgggaggtgaaaaaactttcaaccagtcgtgaaaaagtgcaaattaccgcggaaaagtgccccgattcggaccgaaacccgtcgcaaacggaagcccgcgtgcttctgcagccgcgcactgtggaatcctccgccgaacgatggaatccggccggaaaagtgcatttttcgtcttttcgtcatcgtagacgagggggagggagtgtttcctcttggccccgtcatataggtttttcttttttaccatacgccaccccaacaaattcatccacacaaaaagtgttgttcagcagttgtctgggggggaaggaaaggcagaaaaaaaatagtgcaagcataaccagtgaaaaaagcaagtgttttgtatttgggagggagtgtgattcgattcgtgattttgtagtaattggaagattgggctatgagtggcttcggaacgtccaccggttctgatttgcacttccgggcgcttccgtatctggacaagaagtgggtcaaggcggatgtcggaacggctctgcgatgttcggaggatttggcgaacctgtggaatcacctggtgcaggatgaggaagtggtcactggcaagccccaaacggcggtcaatgcctgcggagatgtggcatatgcccgtccggatgggaagtactactgcggacagcaggcactgaactgtacttgctgcaagggcgtttgcagtgcaacttcgaactgttgctgtccgggatgccagatcctggaagtggaagaagggccggtgaagaagtcgtccggttcgggaacaagtccccaacagcatcagcagcagaatcagaatatgcacgacgggagctgctccgggaccattctggactcatggctgtggagcccgataccaagtccggaagagaaacgcgcctgcaccaggaagctgattgccgaacaaagagagatttgtctccaggcggcggccaattgcctttcggccacgcgcaccaagcagcttctgtacgtctatcggcggtattttatcgcgctgcaacgctgcaaggtggaagagaaagcaatcgccgcggccattagcgaggacggccggccgggaatcaatccggagatggtggccagcgatatccacgacgccaccaagctgagcaaaaatcccagctttgaccggacgcccatgaaggactgcgacaaagccactttcggattggcccgtgtcggaacccgtgccgccctcaacttctcgttcgccttcctgcgtcgagcttggcgctccggcgaggacgtcgaactgtgttccgaactgctcttggaagcgctggaagcactccaaaccctgccggaagcatccctcttcgacacgtcccaaatgtccaccctgtggatcgaagtggtggaaaagtccattaaattcctgcggcaggttgtgctcggggacgtcatgggtggtcgctgcttggttcccaaagctgatcgccatatcgcgttgaatttgctgctggaactcggtgctcagaagggaactcttggcggctccctggaaggtatctccctactgctaaccttacacgaaaaggatcaggaaagtgacgacaatcgaagcccaccgcaaaatgccggagctccgcttgtatcgctcctgaaacggtatgagcagatcgaaagcttcggatcgtacagcgccgtcgattcgtttcacttcggaccaacggaatcgttccttcggttcctaacgctgccagaaaacgaaacaaccaacgtggatctcaaacaggctgccgtcattatcataagtcatctggatcggctggcaaagccgcatctccccgcgggaaactactcgaccaaagttaacaagtccaaatcgcagaagatcttcaccctgggttggagttcctgttcgccggaaatgtacggattcatgtccgaggcaacgaacgggacgactcagttgatgggatcaatcccgaggtattcagctgcaacaatcgaactgccatcgacgcttcaggtgcgccaagttgcatgcaccgaaaacaatatctacattctgacgaccggcggacaagtcttctcgctacattcgaacagttcggagaacatagctccgaaggcattcgaaggtttggaaggagtgcatgtggttcagattgccgctcactgcgaaggaaagcatgttatggtgctcagttcagcaaacgaagtgtggtcctggggagcgggagatggtggccgattgggacatggcgatacggtttcgaaggaacatccgacaatgatagttggcttgcatgagaaacaagtttgcggaatctactgtggagcgtcgtacagtgcggcgataacgattgccggagagttgttcacctggggacgaggaacctacggaaggctagggcatggtaattccgacgacaagcttgtcccgacacaggttcaagcgctgaaatcgtacaaggtggtcgatgttgctttgggaagtggtgatgcccattccatgtgtgtgacggataatggattgctgtttgcgtggggtgatggggatttcgggaagcttggtaatggttcctgcaatggatcccccattccggtgcagatcgatacgcttgtgaatgtttcacggatctattctggatctcaattcagcgtggcactcagctgtgacggaactctgtatacttggggaaaaggacacggtggacgtttaggtcacggtaactcggaacattccaacgttccgaagctagtaagggcactggagggaaagaagattgcagatgtggctgttggatctgctcactgcctggccctgacgagcagcggagagttgtatggttggggtcgtaatgattaccagcaaatctgcccttcgggggtctcgcgagatcctatcatacatagtcctattctgacaacgccacccaccttaagaatatccggaatgacatgtggagctgcccagagtatcgtttggtgtcattcctcgacgctgggagttgcgtccaaaatcccattcgttgtagatctcagtgaacacacattccgtatgttggaccaactgctttgtatggtttgcaacagcccaggagacgtccgtcacccaccaagtcaagaagcggaatgtatagccgtcgcatctctcaacctcttacgtcttcaattgcacgccatgattgtcaataacgtttccgctcgccaagtgggcctcgtcgaaggatctcggctactcgctagcttgaaatcaagaattctgaaccttgctggaggcccagttgttctgaaaacaatgcaggaagccgctcaatggacactccaggtcggatggtccattctcctgcctacggcttcggaacgagcgcaaacactaacctcgcttctcccagctggacacgatacagccaccactagcaacagttccggccatcgctttatgactgatctcctcgttggttccttaatggccgaaggaggcctccaaaccgcccttaaccaagcaatcaacgctcaacgctcgcaagactgcacctccactggaacccatctgtccctgctgcatttactcaaacagctgcttagaaacaattccagcctaacgcaggcccgccttggccaacttatgctgggaccatatctcaagactgaggaaggcttttcttccccggaaccaccctcgcctagtctagatctactgcacaagttccaacgcttgctcctgtcctacatctaccaatccaaaactgacgatctcagcggtgctgaagccctcctagatacctacatccagcaggtggtcggtgcttgtgttactaccttgaacaaagcccacgaaactatcctccaaggcaaggacggagtggccgaaatcctcaagaatgacatttccgatgctctcttgtatgagctgctgatcgggcttgtactgatccagaaagagaaatccttatttctgtccacattcgattggaacaagcactttattccgcttctccatgctttggacaacttcaatcgtttgacgcacgaaggagaagtgcatgactccgatgacatgggatggcctggcattatatgtcgtggtacagctaaggccgctccgatgcaagaagaaaccctactcatccgtaaaagcgacatcgagaatcactgcgccgacggaggcaattgggtcatcatcaacggcaatgtctacgacgtcaaagattaccaagcggagaacgcgaccacacaggaaattctcaactccaacgctggcaaagatatttccctggagataagcaatcctcagcaccggaccgcgttcgagttcatcacttcgtttcttcgggtagggagattcgccatcaacgagatatgcgacaaggaaacccctcgacaaatgaccactctgacccacttccactcggaatgcatgcttgcgtatttgctggggctacgatgtaatatcctccaaacaggatctccgcttcaaccagcggaaatacaatgtaaaaatctactcaattcatccatattgagtggaggacttcaggtccttcaaccgagcaatcccttcgatgaggagaaaggcgaagcccgcagcagtggctcgacagccggaagtactcctaccgatgcttccagtcagattcccatcgctgatgtaccacagatggcaaactggccttcggtgctgatctcgcaccgtgtagaaactatgctctccaatttgggcgaaggaaagctcacagatcctctggtctcctcgtggattgccatctgcgagcggtattgcaaagaaaatcatctgatttggcatcaggagtttccgccagaacatcccgtcatggagctagaacggctactaatgggcgtgctgatccgtcatcagaatctcggtccgctggcgttggccgtcgtcgatcgagaactcagcggtaattgctccaaacctccagcccctatcatcaacatcatcaaaattgtgcaccaaaccaagtggggcatcgtcaagatgcgccaacaactgaatcgaagctacaaggaagtctgcgctccgatgatcgacaagtgtcggtttctactgtacgaaatccgcccggcgatcagtctggaacagcatggcctagccaatctccacatcctgcataaactaccccgcttcaaagcgctcgtccggcgaatcatcaccgaaatgcgagcggccaagaagcaactggcctgcgccaaaccggaagacatcctcaatgtgaccattcaaagccaattcacttcttcaatcaccaaaatccagtcccaagaaaatctcagctgcaagcacctctcctccaccgagaacctggtaaacgagagtctcatcaaggtcgagagtttggaaagcttgacgactgctgcggcacgggatcgctcatcctccccagttatcctagccgtccagaagcatgccgcctcggatgaaaacctcctgaccgtagcaaacgtggacaatgggggtggagatgctaccgataagaagattgcaatcaccaacgaagagatcaagactccaacgaacgagctgatcgattacaacaactccaagatgaagaacacggacggtggagacgagttcatcaacaatgtgatcgcaagcttaagcgaaaagtgcttgatcgagacgtatccggccgagttcaagaacggaattagtcaacaaatcgtggatttcatactgtacgacctgtgcgacgtggaaacgctgcgacgcgccatgtactgtcaaattcaacgctaccagatccgcaaacaagggctcgcaatgctctatgaactgttgaagatcgttggattgttcgacgctgctcagtacaacctcttcaacggctatctagggttgcacgtctccaaaggagaaacccaaaacgcggaacacatcctcgagaatctcaacatgatcacggctttccagaaggcggatatcctgatcgctcaggccaagatcatcgaatgggccgtctctgaactgcagaagtacgtcaaccaagagaagatcaacggacgacatcgcaatcacggcgagaaggacaattccaacctggggacgtatgtgttcttgaagaagctgccgagggcacggttccttttgagtatttttggcatcctttcgcggacgtacgaagcgaatgagttaagcttgcttatcaactcaggcattttgggtagcatcatgggattgctaagacagaccggagccgattttccgaacagcaagaacaatacggacatttccgtcatctacgaggatgttgtgacgaatcttaaatcatccaaagagggacttcccggaccggaactggccaagttgatgaagattggaacgagaattactcgcggtgcggattggaagtggggtgagcaggatggccccggcggagaagggaggatcatcagcgaaatcggagaagatggttgggttcgcgtcgaatgggacaacggctctaccaattcgtaccgtatgggcaaggaaggccagtacgatcttcggctggcagatagtgccctgaaggcactctccccggacaaggacagtgagaaagaggacttcatcgatcaccacatgttcagcgagtcgcatcccaccaagctgctgcgtaacgtttgcataaaaacccttcagatgatctttgcctcggttggaattcacgccgatcaaatgcaggaaaattctttgcgaagcgtcgcttccatgttccgttcgattctaaccaatcgaatcacgtactacaactttggaatggagcagtggactacgattggtttcctacgggcaatttcctcttccaaggcgttatccaaacatctcacatctccggtttggattgatcttgcgttcgaaatactaaactcgccgatcacgtgcaagaaagatgtgtataagaagctgcattgtctgagactgctgcagtccacgttgatcaactggaccaacgaagaagccgatcgcgtcgatgatataattttcaaactgttcgaagttcttggaacgatcagcttgtactgccccaatgatctgtctctgttgaataactccgtggacatcaaatcgagagtgctttacagtgcttctcatacgggtacgatcgcagaagagatcatagttctgatcagaaagttgcataccctaccgctttggaacgagaacatcaactcgttcattgcgcaaaaactctgcctagtggctgacgttctactcgtgagtgagctggagatcaactttgaaggagagaaagcttccatcatggggacactttgcacgattggtggctgtgattccagacctcgattgggacttaatctgactctggacggagttcgcggaacgatctcccgtatgacaaagaaaggaaaagttgtcatgaatgttcacgccttggctgaaacgaaaaagatcccgatcttcaaggtctccgagtgtgccgatatcggagcttttagtctatccaagttgaccattaatgagatgctgctgaattcctgggctgttctgttctacgggatcggtcaaactccaatgaacgtggccaacaacatcagctcgcagttgttgcaaacacagcaaattaacttctccgctcttaaagctaccaaagtcctgttccgtcatcagaaccttctccgaaaaatactgcgtcaaagatcgccgggcgtaactcggagctcctccaaggacagcatatccgatagagacactagtccggaggagggcaaaccacgaagcgaatccaacacttccgacgagtcacaaacttacaccgagctgttgatccaaacgatcctcctgagagctacccaaccaagtccgctgaaggcatgttactcgttcatggagatggagctggccgccctcaatatttcccagatgttggcaagtcacgtccacaacgagttgaatgccccgtctaactccaataagcgtgcattcccgatcagtcagccgacgatgatccacggggtgccgatctacaacaacgaatcggccttggaagatgcccagactccatcgggtgcggaagctgctactggagtatcttccgtgggaactaatcgaggaacagccagacgtagtcctccgagtgcgctagttgcgcagatcatggagatgggcttcacccggaagtcggtggagacggctattaagagccttacgttgcatacgaacaataaaccaacggcagagcaggtggttcaatggattctggaacatccggacgtgacggcgaacctcggtggtaaaggcgatgacaatgacgcctacagcgacacggagagtgccagctcggatacgatggacggaggatcatcgttgcacgattctcagcaagtcccgttcaagatgagagaagacttcaaatcggccgatcagtacgcgatgtatgtgcggggattgatttgccctggaatgttggttcgttgctgtcaggacttcgaagagattcgtaagggagatatcggaaccgtgttgaaagttgaaccggaaggattgcacgatttgaacgttcgagttgactggcagatgcacgatcgaccttattggatgtgctttgtccacttggagttgctggaggcaccaccttcggaaaacagcaccacgatcagtgttggatcgcaggttaggatacggaatactcagcacttccggtatcgtttgaacacgattccaagaggaagcatcggtacagtaacgtctgtgaatggaagtgaagttacggtagagttcccgcagcagactttgtggaatgggcatttgaacgaattggagctgatttccaatccacttcacggtgtgaactccggattgggaggtgtcttcgatatcattgacgactggtcacgatgcatccggtctttaacagtttcgtccaatgagtcatcggcgaagaatcttttggacaggggagccaacttctggcaaagttcatccacccaaggtaaacattggattcggctggaaatccacgatcaagtattcattcagaccttatcgatcaacgttgatccagacgattactcgcacatgccttcgctggttgtgatcaaaggtggcgattctgtggctactctcaaggaactccactgggtttcaatcaatccgacggatgtggtggtccctctgctgaatgaatgcaagcaatactacgcatggatcgagatcctgatcaagcaatgccgcaacaacggtatccagtgcaaggtgcatggcatcaacatcattggaaagaggaagcagacagacctggagatgatgctgcagaatgcttcgttcctggcaacagagaacgaaacagcagctgagccgacctattcgacttcgtcgaactacgcagatgatcagtcgttgaatgaaatatcttcgaaagtgttggtttggggtctgaacgacaaagagcagctgggaggtctcaaagggtccaaagtgaaacttccaacgtattcttcggtgctaagccagttgaagccaattcacattgccggtggatccaagtcgctgttcatagtgtctcaagatggtaaactgtatgcatgtggagaaggaaccaacggacgactgggtttaggtcataacaacaatgtgcccacgccgagacaagttccaattctgaaccagtacgtcgtaaagaaggtggccgttcattctggagggaaacacgccatggcgttgacactggatgggaaggtgttctcgtggggtgaaggagaagacggtaagctaggtcatggcaatcgattgaccctggagaaaccgaaactgatcgagagtcttcgtaccaagcgggtccgtgacattgcttgcggatcgagtcacagcgcagcgattacaagttcaggcgaattatacacctggggattgggagagtacggtcgattaggtcatggagataactgtacacagctgaagcctaaacttgtcacaaccctacaaggacatcgtgtagttcaggttgcctgtggtagccgcgatgcgcagacgctatgtttgacagaagaaggtctggtgttctcctggggagacggagactttggcaaactaggacgcggtggatctgaaggatgctcagtgccacaccaagtcgaacgtctcaacagcgtaggtgtgatgcagatagagtgtggagctcaattcagcttagccttgaccaagtccggcgaggtttggacttggggtaaaggtgattactaccgattaggtcacgggactgatcaacatgtgagaaagcctactcctattcaaggacttcgcggtaagaaggtcatccatgttgcggtgggagctttgcattgtcttgcagttactgacagtggacaagtctacgcctggggagacaatgaccatggtcaacaaggctccggtaacacagttgtcaacaagaaaccgaatttggtgctgggattagacggagtgttcgtgaaccgtgttgcctgcggaagttcccattcggttgcttggagcttaccccaaaatccatcggagaaggacaagaaggaacccgtgccgtttgctgtcagtaaagacccattgggcggtcatagcttgggaattcatgcttccgatacggagcctacaactgctcatcctcaggtcggaaccgttaacccaaaacagcagcgaccttcactatccgaaagtgttctatctctggaaacctacggcgcccgacaggctgccttgtcccacatactgaacgccatgagtattctacaggcaagatcttgtatcatcgctgcgttgacctgtcactcacagctaacggtgcatgacaaaaccctcggggcgttgaacgacacccgccccataacccccgtctcggagaatgacctgattgaaacaaaaaccgacaccgtagtggcgagcctccagaatgaagtgatcgctcagggtggaggtgaaggacctgctgatgcttccggattgacgaccaacgatatcaacgactgcgatatcccgatcgtatccggcatgaacaacactctgagtgcgtatcgcagtctgacgggttccctgtcactgtcggcatcaatatccagctgtaatgcaacccagcggcactccaagatgtccgcgagtgcaatgtccgtcatggctgccaccatgacacatcatgatgagatgatgaacgaagtgcagatcatcagcggcctggatgacttcaccgcactgctcggagaatcggaagccaagcatctgatcgaactgctcaagctgagcgtgtcgggtcgaacgggtccggcaaacacgtcggagacgattgccaacacgttgatcgcgctggccaagggcagcacgacgatcgccaacatgctgatcgaaacctgcatcaccgagctggaggatttgtgcacttcgcggcactcgctgggtaagctgccgaaagccgtcgtgcaggagactagtcatccgtatattgacgatataacgctagttggtcatgtaaaaatcccaggcgccgaagcgcttcgtatcgaattcgacagtcaatgttcaacggagcgtcgtaacgatccgctgatcatcatcgatggtacgggtcgggttgtagcgacacgttctggtcgtgaatgggcacagtgggcgccggaaatcaggatcgcaggggacgaaatgcgttggaagtttaccagtgataattccgtgaatggatggggttggcgattctacgttcatgctatcatgccggagtcgtatctgcaagagctggggtctgatcgaactgtgttgtctcagccgtcgatcgcaatggttatggcattgctggagtcctccctcgttcctcacaatagtaatacgttgatcagactgacggctgccttgtcgcagtgtgctcagctaagttccttaacaattgcacaaaggatttggtcgttgaagaagatgcatcagtatctaacatctcgggaagctcctcgtgcccttgaaccatctgtcgtggagatcctcagtccattgatcccgattatcctacgacaatacgaatacgaagagccgcaagtccgcacaggccttcacctaatgcattccgaatacttcaaaaccttggtagccttggcatgcgatatgcaactcgattcgcttctaccgcatggcgatgcccacaaatgggcatggttccggcgctactgctccgctgttcgggtagctcaatcgctgatccgtcgggtaaccttacctgctacgttcactcttgaagttcgcaagaaactcttggagattgcttcgcctgcgacgaacccgtcgctcccaaacaccggagcaaacagcctgaccagcagcaactgctcgctgattcagcacacaaacagcggttcgaatctcagccaacaaggattcgaactcaacagcagttccgctccaggaagcgagatcgagtcgatcgatacctccaagtatctacacgaagatcacaactacttcacgccgcagtacgactcgcagctgttgcagtggttcaatcgacgacctgaggactgggcgttctcatggggtggagcaagcaccattttcggatggggccacaatcaccgcggtcaactgggtggtttggacggaagtcggatcaagatgccaaccccgtgtgaagcattgagtttgttgaggcccattcagatcgctggaggagagcaaaccttgtatgccgttacgccggatggaaagttgtatgctacggggtatggagccggtggacggctgggaataggcggtacggattcggtatctgcgccgactttggtggagtcgttgcagcatgtgatcatcaagaaagtggcggtgaattccggtgggaagcattgcttggcgctgtcgtcggatggagaggtgttttcatggggagaaggtgaagatggtaaactaggccatggaaaccgggatagctatgatcggccgaagttgattgaagcgttgtcggggatcggagttatagatattgcttgcggaagtgctcattcggcttgtataacatcgcagggacatgttctgacctggggtaaaggaagatacggccgattgggtcatggagattccgaggatcagttgcagccaaaactggtggaggcattgttgggctatcgagcgatcgacattgcttgcggttcaggagatgcccagaccttgtgcattacggatgatgataatgtgtggagttggggcgacggagattatgggaaactgggtcgaggaggatcggatggatgtaagataccgatgaagatcgaaagcttggcgggactgggagtgatcaaggtggaatgtggatcgcagttttcggtggcgttgacacgatcaggaagtgtttatacttggggcaaaggagactaccatcgactgggtcacggcaatacggatcacgttcgtcgtccgaagaaggtcgcagctctacagggcaagaagatcatctcgatcgctacgggttcattgcactgcgtagcttgtagtgattcaggagaagtgttcacttggggtgacaatgacgaaggacagcttggagatgggacggtaacagcgattcaacgaccaaggctggtgcagtctctgcagggcaaacatattgtgaaggtcatttgtggatccgcccatacgctagcgctgtcgacatatcaattgagcgaagccgtccgaccgccgccatcccctccactggaatatgacctagtgcgggacatttctccggaggttcttcatgctcggctagtgctgttgcatcatttctccgaactggtctgcccttgtttggccatgcttccgatcagtggagagctctcccttggtgctttgaaggatatcttggtatactcgataaaggaagctggcttccgaaaggtcatccaaacgactatggtacgtgataaaccgcatggacctgtgatcgagctcaatcggatacaggttaagcggtcccgtatgcgctctggcaatgggctagccggtgttgacggaatgaaaagtgtgttcggacagatggtgcagaagctgccgctgttgacccaggaggccctttcaatgccccatcgagtgtggaaggtgaagtttgtgggcgaaagcgtcgacgattgtggtggtggtttcagcgagtctattgcggagatgtgcgacgaattgcagaacggtagcgttccattgctgatccagactccgaatggccgcggagaagccggtgccaatcgggattgtttcctgctggatccgacgctgaactcggtgctgcatatgaacatgttccgatttttgggagtgctaatgggaattgccgtgaggacgggatctccgttgagtttgaatttggccgaaccggtatggaggcagctctgcggagaagtgcttcgcccatccgatctgacggaagtggaccgtgactacattaccggtttgctctacatccgagatattgaagatgaccctaaggtgtttgcttcaatggagcttccgttctctacaccgtcggctaaaggtcatgaggttccgctatcaacaaggttcaccaaaatcactccggaaaatcgtaacgagtacgtaaagttagccctcaagtatcgcatccacgagttcgacgaacaggtcaaagcagtccgagacggaatgtccaaggtgatcccggtaccgttgctatcgctgttctcggcgtctgagctgcaggccatggtgtgcggttcgccagacattcccctctgcttactgaagactgttgccacctataagggagtggaatcgacagcaccgctcgtgcagtggttctgggaagtgatggaagagttcaccaatcaggaacgatcgctattcttgcgattcgtgtggggccgaactcgccttccgcgaaccatcgctgacttccgtggacgagactttgtcctgcaggtgctggataagtataatccaccggatcacttcctgccggagagctacacttgtttcttcctgctcaagatgcccaggtattcgtgtaaggctgttctacaagagaagctgaaatacgccatctacttctgcaagagtattgatacggacgagtacgctcgggtggcgatgggtgaccctacggaagccaccggtagtgaagataatagcgaaattgaatcgattgcttaaaccactaaactcgtgtgcctctgcgagcttataggactgatcactatacataattctaatgagcagaccctaaaaagggtgagcttaaaaacgaacggaacgttctaggagcaaccaaaaaagacatcctctccgacattcttcgccattttgattatcaacagcaatctaattatacccatgggtatgtaaatccaccaaaacgcaaaccgtgtagcacgattatgcaccactaatatgtataaaatgcatttaacttaactagacccctaaacaatcttgcaagaagaaaaacagagctgttgttcattacgatgttttgcgagtgactccgacacacacatagcaagaacctctacacgacattctaactgtattaccattttgccgccagcttttacgccacactcttgattacctaccttcctaactatacgtgtgctacgataaggttgttgtttcgtttactgaacttttaccgaaccaatcattcgatttgctttactttttcaaggcctattttgcgttacgaagccttgaacgaaaccttacatattacagatatacaacctattgtacaagatcataccaacacacaacaagagatattttattaccatgttatatacatacagaaaagcaactgaattataaaaaaagaaaaaaaatgtaagtgtttgaccgagtcaagattgaaaatgaattgattgatgaaaagagaagaatcatattgtaattgttgagtttcttcatacattttttgacttgaaatgttcactctcattgcatgtaacttccatcctcaattgtgttttataataacaccaactggtctgaaaattatggatttatgatgaacaactaaccttttcattgatccgatgagtcaaattctaaatgggtgacttcaagacaagcattagatttgacaccgtgtgcacagaatatctatcaaaagctcactttcctcctggtccatttcaaaagagcaataataccggtcttagacatgttagcaaacgattgaaagttggaagcagcactacggtgaacagctgacatgatctgaagaatcacaccggacgacgttcctagacataatttagacacaacaaaagcagtggacaacaatagcatatttttccctactggtttgattatcgttctactaaaccaacagacagcagacgcgatttaactcttgcaatcatgtttttcatatttcctctcttgactcaggtgctactaaaccaatgaacaaacccactccccacacataaaaacgttgaatcaaaatgaaatccaattcctctcaaccaatctgtactcgttttgcattgtgttaagtcaatttgttcatatatgaaaacatagacctagaattagggcagtaatcaactactaaaattaatagaaaaaatctagaacatcgtagatcgctaattcctgacgaacgcgcgaaaccacatcaaacacggaaaatcatcaactcccattgaatacaaataccgtcgaaaatcaaacatcccgtactttctcccaattgacgaatatcatactaaacagtggaattcataaaattgtagagaaaaaagagtaatacatagagactgtactgatattcgcaaactacgtttatggatatggatataaacctagcccaacattctttttgagtcaactagagggcatagaatactaagtacacttgaaaatcattcttgtaggctatgccgcccatcatcatggtcatcgctttattgaacacgcggtcgcagtaggcgccaatccgattagagtgcgccataatgttgcgcaagttagcagtgtgtggtgaaatcttttaaggtgcacacacgaataagcagttcagttatttattgaaatcgcataatttattaaaacatcaccatcacacacagacgcgttgccattcggcttgtcactagttctcgtttttttgttcagttgcagtagcaaaaactaatatagcagactttaagaagcgagtaacagttttgcaacgctgtagagtaacaggccgtttatagctttataattagtgcatctacttcaccagagtccgtctttagcctagaatcagggttgaaaactgcagagctcgccctatcactaactagtttgtaggcggggttgcgcatcagtattgttcctttttcagtcgactgagacaaccgagtgtgtacttttttttgggagggagaaaggttataacgaaggccgatgccggttggggagttggcgcgaagactaacactttttacagtgaactgtgggaatcaagagctctagaatttgaattggggggatactttttccgagggagaagaactacgatagtctgttttctttatggtacaattgtccgaagaagagctacttttgtttgcaaatgcgtgagcctcagtgtatcatatgtttaatattctgtgatttttattttttatgtttttttactatctataaaatgaacacgaaacaaaagctgaaataaacaatcatatatatgtgaattcagagaaaa

SEQ ID NO: 795 - DNA, 2960 bp, Aedes aegypti
ctccgtgtagaccaggatagcattttttatatcagtgtataaataatgctcacatgggcgggctttattaataatgtcatatttccatatcgcacaggcctaatgtcgacgtcctggatgtcaacaagaacctacacaaggccacaaaaaataatttttgaactgaaactgcgattttgaatattaccaattctagcaaaacaatgagttttgcttaagtatacttattgtaaaattatataaaaactaacctttattagatgtgccaatgtagtaagcaaaagtcttccgttcaacattattgagctgatttaaaacgttttggccgctgctcagtaggcacaggatattgtcattcaatgctgagtcttcaaaccggtaacatctagcgcaaatccggttcaatcgcggtgtttgagttcagtgagaaggtgttgcacaaagtcatttggctgatggaataaaaataaaagtgtgtgctacctgcttgaagtgactcatttactacgcgagtgttgtttcgagtgctgggaacgaaaatattgtgcattttgtgtgggatattgtcgaaataattgtagtgcaatttagattgaaaattgcgaaaaaaaatacatattttgaggaacaacacaagtctagaagaagagtaagaaaagcaaactgtcagattttgaaaaaggaagataaaggaagaacaaaaacacgaagtatcttcacggcgggcccttttcaaatattacgttagataaaagccatcaaaagtgacagtttcctcacgcaaaacgacaacaagggagtgagtcgacattagtcgacccgcagtcgtcttcttcggtccgccgaaacgtccatccgtcatcgattttccacaaacgccgcggccattttgttagaagtgtgcttgcgattggaagttcggattcggaagtttgactcgtcgacggtgattttgttcgattttccgctgtgtggaatcatccggttcgtaaccgtaccggaacggtcctctccgtgcgcgtcaagtgtacccaggttcaagtgaatgcccgtttaccgtccgcgagtgtgagatattggttggcaaaaggccgcagcaccgaaaaaaaatcgtcggctaatcagaagcagcaaaccgattccgagcagaagagaagaaaaaaaggatggaggacaaggcgacactcaaagatttggaccagtggatcgaacaattgaacgagtgcaaacaattgaccgaaacccaagtgaaaaccctgtgtgataaggcgaaggaaattttggcaaaagagtcaaatgtgcaagaggtaaaatgtccggtgacagtgtgtggcgatgtgcacggtcagttccacgacctgatggagctcttccggataggcggacgatcgccggacactaattatctgttcatgggtgattacgttgatcgtggctattactcagtcgaaacagtaacgctactagtggcgctaaaggttcgatatcgtgaaagaatcacaatcctgcgcggcaatcacgagtcccgccagatcacacaggtgtacggcttttacgatgagtgcttacgaaagtacggcaatccgaacgtctggaagtattttaccgacttgtttgactatctcccgctgacggcactggtcgacggtcaaatcttctgtttgcatggcggtctcagtccctcgatcgatacgttggaccacatccgagcgctcgacagattgcaggaagttccacacgagggacccatgtgtgatctcctctggtccgatcccgatgaccggggcggctggggaatatctccacgaggtgctggttacaccttcggccaggatatttcggaacttttcaatcactcaaacggtctgacgttagtatctcgggcgcatcagcttgtcatggaaggttataactggtgccacgatcgtaatgttgttacaatattctctgcaccaaactactgttatcgatgcggtaaccaggcagcattaatggaattagacgattctttgaagttttcattcctacagtttgatccagctccacgtcgcggtgagcctcacgtgaccagaagaacaccggactatttcctttaagaatatcattataacgaatattgtaatacacactacaaattaaacaaaaaaataatatacctaataataaaaaatataaataataattataagcatatattattatttaatacaaaaaaaggataaaaatcgtaaaaagtttgttagagacatgcaaggaaaaaaaaggtaaatgagacgcgtaaacccgtattacacgaatgaacttacttagataaaaagagaaagagagaggaaaaagaaacggagagaaaacactgcaagtttaaaaaattgagcaacagacaaaaactaagcctgaaagtaatttcacctcacatttgctactcacaagctaggattcagagagaaaaccaacacacagaaacattcattctcgcgaagaaaacatagattaaagattcataaggaaaaagtgcgaagaagaggaaaaataagtgcatatactcattcacagaacgtcaatccacgcattacataaaacaaatagtaaaagaagcttaggtacagtcatcccttccctgttccccactccccacacttagaagctcattctgtcttttgccataataatgatatatagctagaaattcgcgttcatataggttcatcaattgcgtgaaatcatttttcctgttctttttcttttgtacctacacctacaaacaccacaaaaatgctgaaagaaaaactgttaatccgtttgaacactgtgaagcgtaaagcatggaactccacaacggagaagagagagatacaggacgacgaggatataggcatcttttttcattcggaacaaacgctttatgtcacaattattgttcaatgcagatgcgagataataaagtgtataaaatttggaac

SEQ ID NO: 796 - DNA, 3715 bp, Aedes aegypti
ttttttttttttctatttttttatcatcgcaagacacaagtcaggactgcagtttctcagacacgagaagcttggggaacagaaatgctctgctgctatatctcacactcttgatgaatgtcgttcatagtgccaccaagaaatgggactggtaatgcaggaaaagtgagaattcccctactgcagactacatcgccgccgtcgtcgtggttgattgttagaggaagcaattcccccaatgatgttgggatgttctgcgctccgagcttcctccgcgttctctgtatatgcatgcagtcgaccagagttgggttcgttcacacttcgctgctatgccgtgtgtaacactcgagagaacgttctgttagtcacttcattatccgccaaatgctgcctcgcaaggggaagcagagattggtttaagaaaattttaatctagcttgtggcgtggagcgaatcggtcgcgcatcgatgtaagctttgtccgtttacgcatttgcagctattggtgaattttctcgggttttcctacgtttattcgtcattaggtgaagttgtagtttccagctgccgttttttaaacctcaagaaaaaaaatatttcagaaaaatgattctgtgcaatgtgatagtaatggttaaaacgacgttcatttccagatgatggtgaaggccatgtgggaaccctgtgcgaaataggacgttccggatcgacgcactcaccggaaaaaacagtggtagtgaattgggactccggtcatcggacgaattatcgggtcgggtaccagaagcaatacgatctgattgtggtggataatgcgcagatcggcgtgaaacatccgaacattatctgtgacgggtgtaacaaaccgggaattgccggtatccgattccgttgcgcggattgcgccaactacgacctatgtgccacatgctacggaaatgatgttcatgacctagaacattcgttcatccggtaccagacagcgaattctgttggggttcgcgttccgccacggaagggtgccctcaagatacagctgaagggaatcttcgtcggcgcacgtgtcgtccgagggccggactgggaatggaataaccaggacggtggaccaaacaaaaccgggcgtgttatggaaattcgtggatgggataacgaatcttgtcgcagcgtagcgaacgtgtcttgggcgtctggatctacgaacgtatatcggcttggtcacaaaggaaacgtggatctacgttttgtccagccagcggtcggaggatactattacaaagatcacatgccagtgttaggccaaccggaggagcagcagccggtttcgccaccggtgcgctcacacttcaacgtcggcgatcgagtccaggtggccatcccggaagaaaggctcatgtcactgcagcagggtcacggaggctggaatccgcggatggccgagtatctgtcaaagataggcattgtacataggatcacggacaagggtgatattcgggttcagtatgagggttgtgccaaccggtggacgtttcatccagcggccctcatcaagatctatagttttaatgtaggagatattgtaaccttcatcacggatgcggtcaaaatgcagcagctacagaagggccacggcgagtgggtggaaaccatgcataacgtgctggggaagtctggaaaggtgatcaaaatctacggcgacggtgatctgcgagtgcaacagttggacgacgatttggcctggacggtgaatccaaagtgtgtcaagctggaacgttcgttgatatcgcaggcgacggcaaccgaacgatcgaacagtatgatggatttgagcaatcagcgcactaacgagcaccatataacgcccctgtctggattgtccggaacgtccgccgctgatagactcgtccgtgaggctgcccaaggcaatatgaatttcgtgcaaaattatctcagtgccaatccggaggagatcgactgcgtcagcggtggtaaaacgtgtctgcaggtagcggcccaccagggtcacgtggatctggtcaaacatctgcttcaactcggtgccaacgtgaatgtcgtggacaaggaaggcgactcgacgctacactacgcggcattcggcaaccagccggaaattatgcgcatcctattgcagcataatgccaacatcgatgtgctaaactcgtcgcactgttcagcgttgcacatttcggcgcacaagaaacccccacactgtgtcaaggttttactggagtttggagcgaatgtcaacgtgcaggatgcttacggtgatacggccctgcatgatgccataggcaaagagaataccgaggttgtggaactgttgtgcgcttgttccacgctggatctgaccattaggaataagcgaggattcaatgcattgcaccatgcttcgttaaagggcaatgtccacgctgcgcgtaacattattcgcttggcccggcagttagtcaatgttaggaaagatgatggattttcggccttacatctagcggcattgaacggacattctaaagtggttgaggtcttggttaaggagggccaggcggatattaacatcaggaacaaccgaaggcagacgcctttcctactggccgtatctcaaggtcacactgctgctatcgagaaattggtcgaattgaagtgtgagattgctgcaaaggatgaagatggtgataatgcgatgcacttgtgcatcataaagaaggcaaatctagtgcaggatgtgaccgcaacggattcaccgaagatttttgaaatgtaccaatcgttggccccgattgtgaatgaaaatcgtttgatgtatgcgctactgtgtttcctggcaaaagaaggatgcccattggatgtgaattataagggcgcaagagttttggattggattcctagtcaaccagttaaagatattatagttggatatgaaaaagctcatgatgtaccgcctcagatgctgtctaacttggaggcgatgagtctagctgcaaacaatctggatgaaaatgaaggcaacaatgctgcagcattgcaagatggagctgcaagtactggaaccagtggacttggacaatcaaatccgccaaatcctgcacgtagaaatcggggacacaaccgagaggctgctggtgcaacaccgcccccaattccaagtcatcatccgaacgtcgttcaggaggaagattctaaacgaatgaacatcgaaccgttagccccaagtgaagcatccggccccagtgtcacacctttagataataaaaatccaactgcttccccagtagcagtactgtcctcaagtccaccagtcattaccaatatccctcaggaatgtattgtctgcaacgaacaaatgttattaattatcttcgatccctgtcagcatcaaatatcctgtgaagaatgtggtatccgcatgaagaaatgtctgtcttgtggtgtgtacatagaaaggcgtgttaccgtgaatggaaagcaattgttcaacccgaaagacaatcgccagccatccgccgatagacttcgctacctcgaaagtaaaataatggaaatcgaagaaacacattgctgtagcatctgcatggaacgacgtcgtaatgtagccttcttgtgtggacacggagcctgttccaagtgtgccgaaacgctcaagatttgtcatatgtgccgcaaaacgatcactaaaaaaatcaatctctactaa

SEQ ID NO: 797 - DNA, 9296 bp, Aedes aegypti
cggtactgtacggggtacttttgcagccatcagtagtgagaaagagagtaccttgggtacctagtagatactgcgcgagaaatagtggaaaattctattactttgttcgcaatgaaattgcaaccattcgtcgaattgcgtccgtagcaaaacggtgtagaactttgttttttgtttcgggcttcagcaaaaaggcccaaacacgtgtgtcgtttgaccgtggagcagtgggatcactatttggccaccgaaacgacactgggcagtaatcgacagtagtgaaactttcaaacggtagaaaaggaagtgtgatataatcgcagaagtttgcttccatcatccgacgaggaaattctttttttcatcgtgacgtagttttactggttgagacttccggaagtacagctcggaaggaatttcttgtcagcaaaattctcctgatacttcgaagaatgcacagcatgattgctatccggaccgatctggctcgcacgggaatagccaaataaaaacaaaaatacggaaagcaggaacgacctcttcacccacccagggattgccgactccaccagagcccagacagtttggtgagatcaacgattcaatcaacgtcgtctcacacagcggtaagaagagagaagcaaaagaagcaaaccgagctgtgtataatcaacaaagcattgaataagttcaagagaaaataacacagtaaaaaagagtcaaaaacagcacacgagggggccaacggatgtgttgttgtgtatgagcaaaagtttgctgtgagtgcatgtgaagtcacgacacgggttgaaggcaagtgcagaagtgcagtcgtcgtgaagaataacaaaaccccgagtgagagtgttaaacgcgggaaatagtgaataacggtcaccacgagctcgatagtagcagccttagtgccacagagcgtgtgtctcataacaaagaaagattgcagtgcggtgagcgggttgaaggaaatttccttagctgcgtgcgtgattaaacggcagcgcgaaaaaataagagtcgatcggcgagtcaacgcagccaccaataccaatcctatagtaaattgtgcaaagtggtggggataacaggctataacacatagaagttagtggtatcgaagcaaaaaagaagaaaaaaaaatcaattggtgaaattctcctccactcggatgtgcaagttcggaagcagatgtttattgaatgtgcaaacaagaatgatgcaaacgcgagataaatgtgatacagggttcggattgtaatctgagcagcggattactacctagcaggagaaggagttgatcagcaaattggaaaggcaaaacacagaccgaaacgtaaacagagcgagccagcgagcgaggaggacgacgacgaacaaaacgtgcacaccaaccagctttatccgaaggcagacggcaaagtgaatgaacagaacgcgagtgaaaagttgagataggcccagggtacacagaaggcacaaggcagcaaaaaatgagcattgatccaacggaggtggccgctcaaacaacagcatcaactacaacaaccaccaccacagcatcatcatcattattgtcatcgatcctcggtgcggaagaggaggaagaatcgacgctggtcgaaatttcggcttcttcgtcgtcatcgccaaccacggtttcgtcactgtcgccatcgtcccgcactagcaccggtgaagatgggcccgaatcacatccggaagaggcggtgcgagactcagcgaagacgacgactacaacgaaggcgatgacgaacacccgcgaagatgctacggtatccttagattcctctgaagccagcacggtggctttagtcgcggatctgactccggagcagatccatcgccagcaacagcagcagcagccgactctagcaccggtggcagcgcacgttgcaactgacctaccattacaacaaccagaatcccggaatctctttccgatccagtcctcgtcctcactgtcgactccgtcctcatccgaagaatacgatgaatctgttaacactagcagtaccgaaggcgccttgaacgtttccagtagcaataaaccgttgaacaacaataacgacagtagtacagcaataggaggcaacaataccagtcccagcaacgaccagcgggtgccagagagcgagttgagtgccatcgaaagcactctgccacccttaccatcatccggagcgacgatcacattggtaaccagcaccccggagaattcccccagcagcaaatcgtccgaagagcaaaggcaagcaccgatcgagatagtacaaatctttccacccaccgcaaaaacattgtcctcatccgtaacgtcctcttcatctgcatcgtcctcctccccttcatcgggctcgcctccgtcgtcgggtgcctcagctgcgtcctcgacctcgtcgtcaccttccgcctcgccgctggcagtggaccaacagcaacccacctccgcaccaactgcagtttcgccttctcaagttcgagcggaagtgccgccgtcgcccccatcgaaaatggatgattccgccattggcgagccggaaatcgtaaagtccggtggcggtgatccggaggcgatccgggcggcgacattcgtgtaccacaatcgcggttcgtcctcatcgccgcaactgcagagcagcttgaaaaagtacaaaatgggcgaacggagcggcgaaagtgcgcggcgcgtttcgttcccgaaggatgcgcagctcatcaccggctacctggagccgatcgatccgtgggcgtgtgttaccatcatcagtgtaccggaactcatcgaactgtatcggacgtcatgtgcgaaacacttcaccgaacccctacccgccatcaccgagcacctcaccaagctggatctagcggcaaaccagcgagtaccgtcactgtcgctcaaggaccagaatctcagccacggttcgtgcgaagcgctggaggaaatcttcaaacgtgtccagtaccgcagtattaatctctccaatgccggcctggacgacaccagtgccagcgtgctgttcgacatgatcgagtactacgaggcggccaacgagctggacatctccgataatctggccatgacgaacaagagctggctggcggccatcaacatggtcaaaaagagccaagcgttgaacgtcctcattacccggggtcccggaatatccgaacaccacgcgtcgaacttggccaaagcactgaactcttccgccctccataccctcaggctagaacactgcgagctcagtcaacgcccgttggccacgttgtgcaacttgctgaagaggaacactgtgctgcgggagctatcgctggcacacaatcagctgacctgcgatgacgctaagaatattgccaatctgctgagggccaactactacattcagctgttggatatttctaacaacaatattggggataagggcgtggaatacattgtgaacgcactgatcgatcagtcaatctacttcaaaaccgtgcaggaaacgaagcgcaagagcgagttcagcttcgccgatctgtccagcagtctgcacaacatcaacagcaacaagcacttcttcccctatccgtatggcaaaacatcacaacagcaacgacttcagcatcagcagcagtgcaaaccagcgcaggatccgccaaaactatccgaaagctcgttatccgctgccatgtcgccaacgcccctgtcaatgccggcggacgaaaccccaaagactccgccaccaacaccggccttacccgtgcgcacaccatcgggagaagcccttcccgtggtcgtcgggagtttgtccccgccagtggaaagtcaggaagaggaaccgccacccagtccaccgagtgcggctccggtagcagcagcattagaagaatcttcagatttgcatgagaaaagtacaaataacgatagtggtcttaatagtagtgtttctagtgaagccgaacaaacgaatagcgatagtagcgggggtattgtggtgggcaccgaagtacagaagctggaatcgagcagcagcagctgcgagggagaacacttggcggcggtagcaacgaaagccgggggtgaaggcgaaacgaccagtgacattagtggtgataatctagttgattctggcctagtggtttgcgatcatccagataacagtaggactgattgtgcaagtgatgtcgaaggcagtgcaaatgatgtaggagagaaacagactttagagctggcgttcgacttgggcggggatgaagtggacgtgaaagggccgaaaaaggcgcggttagcgaaacaggacagtatactaagtgagttcgaagccaccatgccggagcttcggctgaacacggatattccaaagaagaactcgaccccgagtaaggccgaagaaccgatggatgaagacacgccggaagtttgcacagattacgacgattcaaatctcaaaatagtcgaagagaacctgcttgtagataggagtatcaatgcatcaaataggaaacaaagcgacaccaaagaagcggaagatagaaccgataccgatgacagtgcacccgtaacgcctttagccactcacaaaaaagacgaactacaattgctgctggaaaaatccaaacagcaggaagaacaggacgaagaacccatacctcctcctccgtccctgttgccggtcatcgaaagcgtcccttcggtgcccagtgtagaagtgataacgtcgatcagtgttccggaaaatctcggcgccatcccgttgaagatcgtcgaaggggagctcaaagacaaacccctctcgcgatccctggacagtgcagggtcggcggactttgacagtccgttcctggggggcagccaaccgccagcgttcccgaacgagcgctcgtttagctcggagagcctcaacagcgaaacctcggtcgattccaacgattccaagagtagtttgaagatcatcgaatccaagttcgccgctcgcaacggaacgctggaacggcagcagtcgaacgccaaccgggaagcccagcaggccgatcaatcaccgaatgcaccctgcggccttcaagttctagtcctgtggaacaatgaaatcacccggaactcggcccagtcgttttcggacctgatcgagaacacgtccacgttggagatcctgaatgtgggctgtaatttactgtgcaatgactttgtgggcagtatcaagggcagtctgaaatcaaacagcagcgtgacgagtttgggactgcagggggcgcacttgtccgacaatggcgccaaagttatggccgaggtgatcgagtttggcggtaatgctacactgcagaggatcgacctcaggaacaacaacatcctggcgacgggactggactatctgaacgacgcgatgaagtccaacaaaaccgtcacccggatcgacctggacgatgtgccgcggcgagttgtggaaaactccctcgacattggcccagagtacgcccgcctgctgaacaacattcgcgctcagtgcgaacgtaacaaacacccgcaggaaccgtcggagccgatcagcacatcgatcaaacgcctccggggatcgcacctgggctcgcggaagatctccctcacctgttcgtcgatccgggttactccgagtggggcaaccgccggcgagaagcaccatcaccatctgctggatccgagcaagaaaaccggtgggcgattacgttctccattgccaagtccgattccatcacccatcgcatccccggtgccgagtccctcgcggaatcgcttccaggtgacacgtgtcggcgagtctaccggcggcagtaccagtagtctcaccagtatgaacaacacgagcaatacatctacctcaccgtcgccctcatcgacgggaagctcgccgacactgttcttcgcggcaaattcgcgctttcgtgtggtgaccgtcgaggaaccggcatcgtcgtcgtcgtctgtgcctaactacccgctagggaaactgtcatcctcgtccatatcgccatcaccgctcgttaccagtggcatcagccggatgccaccttcaagcagtagttccgctcctgcattgtcctcatttgtcagttcaccgaaactaacatcgtcaccgattcagcaatcggtggcaacgaatacgccaccggtgctattgccaacacctacagctaccgtgcaaccaacactacaaccccaacaacccccgcagacacaattcgtatcgcctctaacggcaacaccagctacaatcccaccgacaccaaagcccaagcatacacgattaccttccacgagcagcacactgaacgattcggtaatttcatccacgtcgatcgaaagtcccgatctcgaagtgaaacggttcatgaccggagcaaccggtagcattactggccatcatactcgaacgcactcctccaccatggacgacagctgctgttcgtccatcagcagtagcatcgattcgatcgacaacgcccacttcaacaacaacacctctatcagctcgacggacgaaagtttcgatctgatcgttagttcaccttcgtcctcgtcgatatcgatcggctcagtgagcacggctccgctagtaaagtccacctccagccaacagggcgacataacactcatcccacagaaacaacaccatcaaaagcaacaaccacagcaactgttgaccacaacgaacaaagaacctcctaccctgttggtcaacgccaatctgctgaaggtgaagaacaacagcttgtccagtctggagatgagcaccagttcgcaggagtcgctgtacgatgtgcaggacctgtcgtcggtgtcggtatcgtcgtcgagtgtcgggtcgtcttcgctggtcggaggcgtggccgcccggctgacgctaccggccagcagtgggaactccaacgagaacaccctgacgtcgatccagagcctggacaaggacgtcaaagcagcgggtaaatcatcggaaaagccgccgcgagtgcggaaaacctcgtggatatcctcgatcggaaaccacccgaaagcggacagcgcttcgacgggttcgtccggtggtggtggtggtaccagctctggcagtggctactccccggccatcgaaaagctgctgtccatcttcagccctagtaacctgttttcctccaacaaatctagtccaccgagttccgaatgtggaaccgtaagcactgcgggaggaagctcatcggcgtcgaaggagaatacttcttcttcgcagcctccgtcgcggaaggaaagccccatgggagggctgttcacgtggagcaagtcctcgagggacgaggaaaaggtcctgaaagtgaacgtttcgccggagaatactatcaccccgcatcagcaggttagccattcgcagcaatctccgcagcttcccactttcagcgtggacaacatatccagtcagttgaaggcggaaatcaaggagaatatctcccccgagaataccatcacgacacctaagcttttggtgaatccacctccaccgtcgtctcaagctataaccactccggttactacgatagtgccagccccggtagccacggcggctgggtctcctcatcccaaggtcatattccatctgggaggtgactacgaggattccgaggatgacatcgatacgctaaccagcaaatatggcggaggaagcgggggaccaggcggtattaacccactgtcccatccccctttatcgtcatccattctagggacgagcgccggaagcactaccaccaatagcagcggtatcagcatcagtagcaacatggccgaaggatcgcccaccccatccagtggaatcggcatgggtgggatggccattctgccgaccagtcatctcggccagttggcacgggattcgttgaccaccatgttcaagaactcgtcgcttacgtcgcaggactcgatccggtcgatggattccctagcggagatggccgaaagccagacccagatatcagcacttcatccgcaccagcatcaacatcagcagcagcaccaaccggatgacacgcaacaagctcagtagcggacttgggtggaacgtaaaagtgtcgaatggttgatatgatttcttgattgaacactgtctttagcatagataggaggaaggcgaaattttgtgtgtggttctgaatgtctcttagacttacctgcgttcgcggggatgtgctatggcttcgaaaggaactaccagtagaagatcgcgttctacatcgcattttcggtttgcatgtttcggaccccctaccaaaacaccccaccacgccacatccacaatcaatccactatgatcgtgtatcccctatacgttttatttgatcctatttaaattgtgagaagcaacaagtaattaatgtgccttctttgagcaagcgaacactgcaagagcagcgcgaaacggaagaaagaatacgttggcggggcgtgaaacgcgaaactgaactgaccgatggaacgacaggtaagatgtaacgaattacttaaattttatacaaataattacgaggaaaaaagaaagaacaataataccgctattgggaacggaagaggcgtagaatattcgaatcggcagaagcttattccggtgggtttggtccgttgttggaagggtttggggatgggttgagtgtgtatattgtgtgtatgtgtgagaggtggcgatgttcgaatcactgtttagtaagcgaaaggcgactgtaatattctagttcataattttgctattggcatcacttaatcttaacctattctcaacgatgaagaacttcactgtaaaagttttgagatggttcctctctggctccaatttgagatgaacaactaatacagacggaatgaataaaacatggcttttagaatctaaccaggggaatagcatgaattctcgacacatcactcattttatgtagaaatctgaaaactggcacagaatttgtgtaggttcaatacgcaaaaccgaccataattgatacccttgcaccctacatcacttcaccctggtcagtaagaggcccagacgatcaacctgaggttcccaacggtatgcgaatgcaggattataaaaaaaatcatacatgcttgtatggtatcttccaggcatttatccctaaattcctccagcgtttttcttttcatactgaaaagggacataagaatttcatacaattctgcaaagactactttgaaatgattctaccccattacctcgaatgccatttccccgaatgccattatcccgaactccatcaccccgaat

SEQ ID NO: 798 - DNA, 5549 bp, Aedes aegypti
gtccaaccattttccagtaccgggtagcatttttgatctcacaaacacaaccgaccactccctcgtcacacgaagagagccgaacgttgacagtcccctccgtcgctggcggtagttcggttgcaactgtcaaaggtggaaaatgccactgtgttttcgctttcccatcgaaatgttgccctaatttttatttcgggaatttagtgaaaatttctgcacgaactcgaataaatttcaccgcaaagtgtgcaacaatgttcaattgatcggttggcggtgaatttcagtgcgcggaagtgttttccagttcgatagaagaagatttcttgcggtcgcgagtgaagtgttacccccctcttcttcacttcccacccgcgggcgtgtttcgctaatcgatttgggaagggagaaactacgattctttttttggaggtaaaaattcttgaaaagtgtgcctctcggaggagaacagggccaaaatgacgccgcaaccgctagagcagggaggagccgtggccagcttcatcccgaccgggcaggaaatggcccagcgacagaatttgataccgctggggcggctgatcgatttcattatccagaggacgtatcacgagctaacggtactggcggaattattaccccgtaaaaccgacatggagcggaagattgaaatctacaacttttccgctagcacccgacagctctttatccggctcttggctttggtcaaatgggccaactccgcatccaaggtggacaaatcggccaaaatcatggcctttctggacaagcagtcgctgctgttcatggacacggccgacatgctgtcccggatggcccgcgaaacgttggtcaatgcccggctgccgaactttcacattccggcggcggtggagattcttaccaccggaacttactcccggttgccgtcgatcatccgggaaaggatcgtcccgccggatccgatcactacgctggagaagcgtcagaccttgcagcggctcaatcaggtcatccagcaccggttggtcacggggaatctgttgcctcagctgaggaagtttaagatcgagaacggacgggtgaccttcaaggtggatcatgaattcgaagtgtcgctaacggttatgggcgacggtccgaacatcccctggcgcttgctggacatcgacattctggtggaggacaaggaaaccggggacggaaaagccttggtccacaccctgcaggttaactacattcaccagttgattcaaggccggatcgtggacagcccggatgcattggccgaagtctacaattgcctgcattacttctgccaatcgctccagttggaagttctttacacccaaacgctgcgtttgatgcgcgatcgactggatgatcacattcacgttgacgagtacattccgggaaccaagctgacggtgtcctactggcgagagttgaccaacaaagatcccaaatcggagctcggctatcgactgatgattcaaactgatcagagtgataccaccaaacagctggcgatcttgcaccttccctcgatcggtaccaaggaagtggacatcgccgatcgagccgttcgttccgagctgctctccatggaacgactgcttgtccatacggtttatgtacgatcgttggctcgtctgggcgacctcaaaaccgaactgcaactcttcctcaaggatgtcgactacagcatccagggaacgccggcgatgctgctggttccggtcctgaacccctgcctacgagccgaacacatctacatcaccgtagatacccacaccggaatgctccggtgtcacgttcccaagcacctggattgccccataatgccggagttgcagcacgcgttgaacaacgaccgcagtaagctgcagcacctgttctcggagttgcgctactggataacgcagcggcggtgcgagaaaacgctgcagcatttgccggcgaccacgcaggagcggttgccgttggtcttcccggcggatcatcctatcgagaagattggcccccatcgggtgtacattcagatgtgccggcatgcgaatgttatactgatcgtcgaactcaaagagaaggaatccagccccaatgaaatgacctacaccttctacctggtgctggtgaagccgtcctccatggaagacagtcaatcgtcggaccaagatcagccaccggcatccaccgccgcatccgccaatcaatcgggcccgggttccgtccctcctggaggtcctccgagcgtgtccagtgtaacggccggcggaacttcgcaatcatcggcgccctcggccgccaccacggaaagtgatggaatgccaaaaatgtacctcaaggttctttccctgatcgagttcgacaccttcgttgccacccatggacccggaacgtacgttgatgaacaaaccgttggatcgaaacgtaaactgcttaccggagaaggaccttcagccaagcaatccaagaccatctacccggcgtacttcatcccggagctagcgcacgttgtggccatgtgcgacgagaagctgccgttcgtggccctggccaaggacctgacgcgccgtaagattccgcacggtggcgtccaggtcgaggccaatgcaacttccttggtgctgaagctgttgacgctgcctcaaccgaagcctccggtaattccggtgtcgagcagtgcagcagcagcggccgcagctcaatccggaccggatcagaaaccaccggaaccgaaggtggtcagcgttcccaagattgacaaggacgtctggaatgcgctgctgaaacggctgctctcggtgtcggttcgtgcccagatcaacaagagtattcagactcggatgtggacggtggagttggtattctatggaactccattagccagtgcgcatcacaaagagcagggaatgcggcgtgcggtttatctgacgtacgacatgcttccagtcgattcggttgacaagttcgttgacatgatactgaacgactggtccaagatcgtctatctgtacacattggttcacgacttccgcgagcagatcaagaacgacaagtacaatctgcacaacatcgtgaccataaagtcctacagctacacgagccttcttttggcttacggcccgaacaaggaggtgaacgtcaacatctactgggatacggaggccaaggagttcaaaatggtgttcaccggaggcaacaacgccatcaacgcacattctatgatgcgagatcagctgcaggctcacttgaaccacaactacgacctagcgcagattgtctatctgcttcacgagacctaccaaccactttcgtccattgccaaactaccgatcataccacacctggcgatcctgcaatctcccaagatccccgttctgtcgttctgcatcattccgcaatcacctaccctgttgagaatttccttccaaggagtgtactgtctcgaggtacgtctccgcggatccggactctgttcgattcgagacggggcctacagtcgcttcgatcgaagtcacgtcgttgaagagttcactcctacgcaaggcctgaaaggcttcctgtccaagtacgtagacgaaacggccgtctaccgacgccgatcgcaatcagaagatgacaacccaccgtcccccatcaccatggaagacccccacggtggaccggcatccgttgggtcaaccttcctcagtggcggagccatgcgtggccctcagagccctcgcgatccaggacttcgcttcgcggctcctctaacgcctccctcggggtctaacccacatactccggcctcaccgcatccccagggcatcggaggcagccagagtcatccgaactttaacatgacctccccaccggctccacatatgccacatccttcgcctagcggcggccttatgccatcgtcaccgttgaaccctcagcccagccccatggctgcgcattccccgggaccaaccaacctaccgtacatgtccggccacaccgacagtccgttcagtgctcattcgccggcagcttccaactggccagggtcacctggtatgccgagaccttcgccccgaccgggacaaagcccggaccataaggcacagactccccaccacaacacatcgcgagtacttccggctcgatcgtgggccggcgccatacccaccctactgacgcacgaagctctggacacgctgtgtcgtgccacgatccacccacagaaggagatccctggaccggaactcagcccactggaacggttcctcggatcggtgttcatgcgccggcagctacagcgaatcatccaccaagaagataatttgacggccatcacatccaacgagccgggcgtagtgctcttcaaggccgacaacctgcagtaccaggtgttcctgaatccgaaccacatgcagtcgctgcacatgaaggtcagccaagcgccgatggccccgaccatggacggtaagccaccgtaccagtggccaccggaagatctccaaatcctggagcagttcttcgatcaacgcgtggccgcaccaccgtatcgcccggccgtcgttaccagctttacccggatgctgaatctcccgtcgcaggtgatgaaggacttcatccagatcatgcgcctggatctgatccccgagctgggccagggcaacaagtggaacgtgcaattcattctccgtatgccaccgtcggcaacgccgatcgtccccgttggaaccaccaccatcctgtcccatcggcagaaaattctcttcttcatccaaatcacccgcgttccatatctgccaaacatggagctgaaggactccgtcaccatgctgctgccgatggtttacgacatgaccgtgaaccacactcagctggcggaacgccgagaacagatcatcccgcagctcaccagcgccgtcagtgctcatctgagacgtttcgtcgagtgcaccgtgcttcagccgggcgaatgctctctcttcccggccgtacgggatctgctcatgaacctaaccctgccgaacgaacaacccccgccagggcagatgggcaaccagatcggaacgatgggtggaatggcaccgggaggtcctggtggccctggtcccatgggaggacaaattgcaccatctccggttgggggccaagtcgtatccagcccgaatccgatgatgcactcgccgatgcagatgggaggcggtggccagcagagcaactatggcggaatggttggcggaggggcacaatccggcgtcccaggaggtcccggggccggtggaccgaactgaggttactgaagggtgactcaaagttatcgaaggtgtttaggtctcctaggataagtttctatcatatacacattatattagcgcactgtagattttactaacttaatctaacgtatcagatcatgcgagagtgaataatcaaaacgaagagctcatagtgcataaaaagtaataaagtattcttcgtaaacaactttaaataacttatatcagatgtttagctttaatatacgaccgttgttgaagatatctaacacagacaaacagacg

SEQ ID NO: 799 - DNA, 3971 bp, Aedes aegypti
gtgtacataataaagattgaacaaatggatacgtgccagtgcggatttgatttgaatagtttttgtgtcaacagaatgggaatgtgaaaactattggtatttactgcgatttgacagcgtgagtaccgggcctcaaagtgtcaaaggccaaaacaaaacattctctgttgcgtgggatcgatcaattaatgaaaaatagcaattaaagataccttagcatgtcagaacgccgtggtacgaaggctctagaactatggtgtcgccgcgtcaccgagggctataaggatgtccgcgtcacaaacatgagcacctcctggcgcgacggcctcgctttctgtgcaattatccacaactttcgtccggacttgatagattttaccgcgctgaaaaaagaagacatatactacaacaatgaactagcattcagcatcgccgaaaagcatctcggcatcccgtctctgctggacccggctgatatgctaaaatacgaagtgcctgaccgattttcaatactaacctacctgtcacaatattaccgagtattcagtaatcaagagccaaccgccaccagcaaaaaagtaacagaaaaggaaaccaaatcgacggacggtttggacggcaagatggccaacccaaccgctttcgtaggagtcccgaaacgcgaaccttgtcgcaagtgcggtaatccggtgtttttcgccgagcgtatcagcttcgagcagaaactgtttcaccgttcctgtttgaaatgtgcccgctgtggagctcagttgacgttgggcagcttctacgaaacggaaaccgatggcgagtattgctgcgaaacgtgcccggatgaagaaattcaaatcgccgaacgacgtcgatcgatgtcctccgaagtgacggagtctccggtaaacggaagtcgagaaaacgttcgcaccagtcgaagtagcaaacttttagagcggatatcattttttgaatcggctcctctcagcgatgaggaaaagacgtccaacatggttaggcgggccaagatgagtagctttctcaaggactcgttggaaaagccggacaagttggatgactttaaagaaccagagaagaatgaccaaccaactcgtcttgaggattcatcggacagcgaagacgagccggaacaagaggagtctcctccaagtctaccagcgactgatccgcctccaagctcaccggcgactgaacctgctcccacaatatctgaagaaactaacaaaatcgttgttgaattgactatcgacgatttacctactgatgtttcaagcaaagtagatatggatgaaaacttgaacatacagaaagaatcggatgctatcattgcagagcgtgataactatgaatctcttgaatcccctgtaaaaagtcacaaacctttagaaacttctgaaaaattgaataaggatgttactgaacccgttccgttgcaagaagatgcaactcttcaactggatagcaatgaaaattcgttaaacgaaatggaaaagattgctgtggattccgaaactcctgtggaacacgacttaaaagaggagaaacataaggagcaagaaaacgacgttgaaaaggagaatcagcctatacaagtgcctgaagtaaatgtgatttgcgatgaaaggattgattatactattagtaatccggaagaagtgcctaagaatgaagccattgtaataagtgatatcgcaaccgcagaaacaacaactatggaagatatatcgcagcctatagaaagacaggaagacgaacctacaactaacgaagcgtacccttcggatttgaatccattcggagacgaatccgatgaggataaagtacgagctccgtccaaacccgttcctccagtaggaaaggttagcacaaatccatttggtagtgacgatgaagacgaaacacaaacggttaatgccaaaccgccacgtcctccgcctccgaaaatcaaacctcctgtaccggctaacccattcgacgaagacggagacgatgagccagagaaagatatcataccagtcatcatcaagccttctcctcgtcgaactccagtcccaacgccacgaaagcagcacaaccatacagattctatcagttctatggaaacatcactaatgtcgagtcaatttggaggctcaaatgcttcactggcttcatctttggatagcgcttcagcgtctatgacgattactcgcagaaagaagtcgaaagcacctgatgctccagtagccatcacgaaaacatccactgaaaacttatcccccagtcactctacaactccgcgcaagaagcgcgtagctcctgcgcctccatcctctacgcctaagtcaaatgatacacattctctctcccctaaccctactcaacgactcatagcacttgatagtagtttaataggaaatgattttgatctaaacgagcccataagtcgagcgcctagcaatgattccgtagtctatcgcagaaccatcgttcctttgaaaattgatgacgacagtttgactctggaaaccaccacaagcgagaggcagtgggaaaaaatgaaagacaacaaggaagctcagaaccgcaaccgacaatcacagacttcgccaaccagcacccaaaacgattcctataatgctttgatttccaacaaatcccagcaagggaaatggaagcgacgcaaaggccccgctccggccctgcccatgccgttgccggagcgcaaggcgatcaagatgctcccgctgaaggagatacggcaagagatggacatcatcgaaacgcaacagcaagggctggaaaagcagggtgtgatactggagcagatgatccgcgagcggtgcgaaggcgtcgatccggagatggacatcacggggattcagaccaactccaaggaggtggaagatttgatcatgcagttgttcgagctggtgaacgagaagaacgaactctttcggaggcaagccgagctgatgtatttgcgccgtcagcaccgactggagcaagagcaagctgatttggagtatgagattcgcctgctgatggcacaacccgaacggaacaaaaccgattccgacaaggaaaaagaggaagcactaattgctcggctggttgagattgttcagatgcggaatgaggtagtggactgcttagagatggaccgattgagagaagcagaagaagacatgagcataaaacaaagcatcgaagaaaggacagccagccaacagaaacatggtaaaaaggattgcgactcggaaaaggctgctgctagtggggactcgtcggcgaagctgtcgaaaaaagaaaagaaaaagctcaaagaggcgaagaagctggtcaaatcgaagaaaatcgattcggaaaaggatgctgacgaaaccgaaagcagcaccaaagagaaaaagaagaaaaagaaattcttttctgattttctgcatcccaaatcatccaactgctagaatgttatccacccggagtatcgcaatcttatgataacgcttgtttgtacttgctgcgcttaaatcaatctatgaagtggtatattttcaaaccgatagctttttactcagagttacaaattctgatctgtatgtcaatctgcgagccttgcttagaacaaccgaaacaatcatacattccagttgctgttgcatagttttcttcaatgtcgctgaagaaaatagtaaagaagtagttaattagctgttaaatcatgtcatcatttttttttctttttttttacatatcatactgatttaacaaagtttatgtttttttttgtatcttgtgatcgtttcatttgtcatttcagaaagcatttatatgtataaacgatacatcgtgtaaaaagacgtgtccctagctcggttaagttttgtttaccttttttatcgtttatgatatggaagcctcttttttctgtgcgatatgtgaatatagtaacaataaatagtacacatgtagaaggcgta

SEQ ID NO: 800 - DNA, 1597 bp, Aedes aegypti
atggatatgcctaatcgtagcgcacaggaagagtacccgacttggatcggtttcgtgttcatattcaacctaattgtcggaacgggggcactgacccttccctcggcattcagccacgcaggatgggttctgggatccggcctaatcgtggtgctggccttcgtcagctacattacggttacgttcgtgattgaaacgatggcctgcgccaatgccatccagaactggaagcggctgcagttcattaagcgcgaccgggtgattgaatacgatgaggacagcaatgtggaaacggtcacacagcccttgatcgcttcgggcgtcgatggtggcgatgtgaccgatgccagcatcgagcaaaccccgttgaatatcatgtattgtcggaaccagtactacagcttgtcgaacaagatcgaactgggcgagatggccaatttgttcttcgggcgggttgggcgttttctgttctatttctgtttggccgtttacctgtatggggatttgagcatctactctgctgcagttgcgaaaagtttgagagacgtgttgtgtgcccacaatcattccgccaacgcaacggacaacgacgatattactcttcgttgctgggaagacagtgcgctatctcgattcgacatctacaggctgtgtctggtagtgttcatcagtattcttgggccgttcaccttcttcaacgtacagaaaaccaagtacttgcagctgataacggttatgttccgttggttggcgttctcggtcatgattagcatagccattcatcgacttctcgcagagcagaataatccgccaattgtgccgaagcgcgcagacgtaaatggcattccatacctgataggtacctgtatatattcgtttatgtgccaccactcactgcccagtctgctgactccgatctcgaacaagcgtcgcatcaagtcgcttatatcgatggactatctcctgatttgtggattctatctgtccctggccctgactggaattttcgctttcagcgacatcaaagacctgtacacgctgaactttgttcccaactccgatcaggatagcctgttcctcaaaggaattgaatacttcctggcactgttcccggtgttcaccttgtcgaccagcttccccatcattgccataacgctgcgcagtaatttgcagacgctcttcctagacacgacccagctggagtcgtacaacttcttcctgcggcgggtgttcttcccactgttggccatcctgccgccgatcgtcgtgtgcttcttcaccgagagtgttatctcgctggtgggtttcaccggatgctacgccggaaccggtatccagtatttgattccgatcttcctggtgttcgcggcgaggcgagtttgcgaaaacatgattggccgcggtattgtgaacgacttccgcagtccgttcaagggcaacttttggctgctggtgatcttcagctggaccctgggctgcctggtgctggtcacgatcgatctcatgaagtagggggtaaaggatgatgtttcatcgtcaccgatcgctatgatcgatatggattactgaatgtaataggtatatacctaataaaagt

SEQ ID NO: 801 - DNA, 3343 bp, Aedes aegypti
gtatgtgtgcaccgtcgaacgaaaagtcgcgtagttaaaaatccgaatggaatcgaagcgagcagttttttctttgcaacatcagccatcatcgtcgtcgtcgccgcggtccgtcgtcattttcgtcggatgtttgtgaaaaactggaaccatgatctgttccggaacgaacggatccaaacagttttgagattgtttagcggattgggaattgtgccgagtggtgaccagataggttaagtgcggaattttcacggcgaaaagtgtgcagtaaagagctttcctacattatttgaagttgcggggagaagcaaaaggaataagaagcagagggtttttttcggaagaaatcgacgggagtggaagaaaagagaatcggtaacaaaagtgtgtggaagtgaaggaagaatctttcttcggtcggaggctggaaagaagcgtaaaataaagtgtgcgtgtgttattgaagaagagggtgttgctttaggtattattttgctctgattttttctccgtgctgaacatccaagaagtggtgctacgccaccaatcgaattctgattgctcctggattcaagattcagggatctgtccttcaaaatgagttccaacaatacggccaccacaaacagcagcagcaccaccagcagtaacaacagtagcagcagcggatcgaacagcatcgaggcggaatacaacgagatcgagtctcgccatggatgggctttggttttccaggaaatccgggagaagagcgaacaggaagcacggtcgaaggatttttccaccaatgagtcgaaaaagttggataacaggcgattgaatcggtacagggacgtgtctccctacgaccactcccggatcgtgctgaagcgaggcgagactgactacatcaatgccaatctggttaagatggaacgggccgagcgaaagtatatcctctgtcagggtccgctaccgctcaccgttggacacttctggctcatggtgtgggaatacaattcccgggcgatactgatgctgaacaaactaatcgaaaagaaacagatcaagtgccacctgtactggccggaaaagattggcgaagagcacaaattggaactcccggaagtacagctggcaatcgagtacgtcaagtgtgtcgagtataaaaacttctgcaaaaggacgttccgattaactgacatggaatcgagtaaaacacgggaagttgtacaattccactataccacttggccggactttggcattcccagttccccggtggcgtttttgcagtttttgaaagaggttcgagagtcgggagcgctagataaggatgtaggtccaccgatcattcactgcagtgcaggaatcggccggtccggaacgttttgcttggtagactgctgtctagtgttgatcgataaggaaggagaagacaaggtggcagtacaagatgttctgctggaattgcgacgataccgcatgggactgatacaaacagtagatcaattgtatttctcatatcaagctatcattgaaggcatgaagcgtatgaataattcgtcattcgaagatttcgaagagctgtcggtggtggtaaccaataatcaggtcacatcggatcaagagaatgacgataccccaccgcctttaccgccacctcgatcgcactcgcttacaatcgctcagaaaccgttgccactgattccaaacagcgaaagtgtccacgaagatttcctaacgtgcaacgagcgggacatggttaacaatttggtgaacctagaaaagagtaagcaatacgagattagtaaggatcgaccgctgccaccgttacctaaggactcgctggagaaggtacacgaggcgaccagttcaggtgatagtggcgcgtccagtagtgatgaggacgagcttattgaggaaaacgatagcgaccaaaacggtgatgacagtgaggaggacaatagtgataacatcgaaagctccgtgttagacgatacaacgataaccagttcgtcctcgtcggcaatgacttcaacgtcgacggccacatctacgacattgacaacgacgaccagtgcaacagcaacggcagccaacagtaatacatcgacgttggaatccaaccgtggcggagaaaagttcgatgccaatgcgacgctgccaccagtgccgaatggtgtggacagcaatagtaatagtgccggagaggaagcagtgtctagcccagagagaggacaatcaccaaacgccgagctgcgccgccggaaacgacttgagcgccagtccgcaatggaggaaaagattcgggaaatcaaacgcaagcagaaggaatcggaaagcaattcgccgaaaaagcgcaggaaacaaatggaatcagagaaatgatatttgcaaataccatggaaaatctatttcatatgttacatctaaaacgatgtaagatttcggctacagaaaaaaattagcagcccagcaaggacaaatgaattgttaacaataaccgtaaaagtgttaatctatggacagcacaaaatgtagtggaggtattcgcgagtacctaggccgcagaaaagtcatctcttcatcagcattcacaaagctcaacaacagcaggaagtaaaaactacagcggtatgatatagggaaagaatatcgataacactggctgcagaaaaaaaacactcatataactaggaatcaaagactgcataatttgtatcgatttataagtagagaaaaacatattccataataaatagtcgatcatgggaaagcattggaaatgagaaagttcaattacaatacaccacaccacaataaataaccattaccttctaatgaattcgtttttgaaaaacatagaacgaatcagcaattcgatacggttagggtaggttcctctgatacattacagtatattcctataacaacgtgaaggcacattttttggcattcaggtattgaaggtaggtttaaggcttagcaactacaagatagatttgggatagtggttatagcggtaggatttattaagtttaccctaattgcatattagactagttcattgatttgtagactttgcgttttacctcacaaggactcgttggttacagtgtgactggtattaggttactttattagtgttgtcatattggtacattcgatttatgcagttttaatccaactctggtgaatgatttgtagcaaacattttgttttagagataaaagctcaaagttgtcccgaaaataattgtttaacaagaggagaaaataaaggaattgatatttcaaacagttatggttacgattataattttccgtatatcttcttcgtagcagttttcgaaggtatt

SEQ ID NO: 802 - DNA, 1398 bp, Aedes aegypti
atggcgtcctgtagccgtgcgcacgccatcaatgcggtgttggtggctggatttctgctgatactgctcaatctgctcggctctcgatgggactccgcaccgataggtctgccacgaatgggaacaacccaatggccgaaacgcacaaggaccagttccgatcggtttgttcaggtccacgcgccacatcagaaccgaagcatcgacagcagaaacatcagcaacaacgtcaacggttcccaccagcgtgagctgcatgcgaaccatgaccctaactacaacaatcagtccgcgccccggcagccaaacaaatccctcaacaataatgatattcctgttaatcaatcgtcaaaatctcaaaagttcaacgaatctcaaccgacgacggcgggtaacagcagcagcagcagcagcaacgatactaaccctagcttaagtagcaaaaattccactagcattagcgactacagtgagaatctcgtagaagttcgtcagcagcaaccaaacgaaacaatacagactgatggtagcggcggtggtggcaatggcactcggcttatcgatagcctggtgagaaagctggcaggaaatagctgtccaccgattccgccgaatttagatggtcccgtcgaagtggacgccaccttcgaaacgctttcgtccgtggagcaaaagctggccaccaagctgcttcccggcgggcattatattccccgtgagtgcacagctcacgaccgggtggcagtgattgtaccctaccgggatcgagaacagcacttgcccgtatttctgaagaatctccacccattcctgatgaagcagcagatcgagtacggtatctacattgttgaacaggccgccgggtcgcagttcaatcgagcatccctaatgaacgtcggttttgccgaagcgatgaagcagaaaaactgggactgcatggtgttccacgatgtggatctactgccaatggatgaccggaatctgtacacctgtccggatcaaccgcggcacatgtctgtagccgtcgacacgtttggcttcaagctgccttatagtacaattttcggcggtgtatccgcaatgactgccaagcagtttcgtacggtgaatggcttctccaattcgttctggggctggggtggcgaggacgatgacatgtccaataggctgaaacacgtagggttccacattgcacgttatccaatcaatatcgcacgctacaccatgctgagccacaaaaaggaaaaggccaaccccaaaaggtacgaaaagctcgttaccggtgcgaagcggttcgacagtgatggactgaattcgctccattataaactgatcaatctgatccggaaaccgttgttcacctgggtccacgtggaaatttcacaagagaacagctga

SEQ ID NO: 803 - DNA, 1474 bp, Aedes aegypti
atgagtcggaagaatgaaacggagcggcagaagcagatccaggaaaaatgccaaatgctgctgacgaagatgctgcgggacgatgacaacaagtactgcgtggactgtgacgccaagggacctcgctgggcttcgtggaatctgggcgtgttcctgtgcataagatgcgctggcatccatcgcaatttgggggtgcacatctctcgggtcaagtcggtaaacctggacagctggacgccggagcaagtggtatccttagagcagatgggtaactcacgagccagagcagtatacgaggcactgttaccggatggcttccggcggccacaaactgattcggcgttggagagtttcatccgtgccaagtacgaacacaagaaatatctggcacgagagtgggttccacctccgccaccaaaagtagactgggacaaagagattgacgaggaaattgagcgacagaagcgcaagaagaaggctgcctctagtgggggaaccatttcgctgggcacgactggttcgttgggaagttcgtcagataagaaaagttcgaccagttcaaactcgactacggcagcggttccattgccaaaacttaaagctccggccagcagtacgaaggcgtcaagcagaaactcgactgaaacggcggcaagtttagctgctaataatagtcagacctcatcagatttgttggggttgtctttgggaggagatgtaactccaaagaagacaaatggcgagagcacgctggatatcttatcgagtggaggaccggataggccaagtgaaaaagccgctggcggcgatgaggtctcctccaacttggcgaaagaagaggctgactttttcaatcaagcgcctagtaaaggtactgatgcgcagggaaagttaacaaaggacaaaatcatggctctttacgggtctgcacctacgacaatggtgaacaacaattttggaggagcatttggtaatttcaacagtttccaacctaacgcttaccctccggcaccaaatgtagcgatgaatccttatcagatgaataacggtcaacctgcgccagcagctggtggatttggtgccttccaggctttccctacggcaaatggccagtacatggttccaggtgctgcgacggcggctccaaatatgcaagctgctaacctgatgtataatggaccattccaatcggctgctgtgccgacgacggctcagtctcaaccagcattcggtgcaattcagtttcccaatcccctgcaaagtcaacaagtgccgtcagccggtggcttcgtcggtatgaccggcgctgttccagcctttgcaaactttcccccgcaaccgacgcagactcaacccgacaagttaagcaatcagttcggtaccatgaacctacgagacgtgtggcaataatttacattaatcaaatcctgatttacttatgtgtatcttctggaacctccgcagacttattttc

SEQ ID NO: 804 - DNA, 7526 bp, Aedes aegypti
ttctcgaagctctctctcgggccgtaaagtcgccatttttgtcctacctctccggtttgtacgtcaagcctttctttcttggagctgggttggagtttttcaagtgtagaattcccgttgaaaaagtgattttcggtgattggaaagtgtgctgggggttagtttggaccgggagggacaattttccggcggaaaagcgtggattccgagcccggtgcgaggtgaatttgtgcggttggaaaagttggcaaattgcaccccttccctcaagttttcttccagagtgggaggagggtgacgaagaaaagaagaagaaaaatccctgtgtttattaagccgcaatggtggccaatggctaagcggggaatcggctgcctttctgtactgtgaggaatttctgttgttttttaattctgtgtgtcgatttacgacgacctggtgccggatttcgaaaggagagcaggaaatcggaactggggcaaaatgagtgactccgacgatgacatcatggccggatctcgaagcagccgtcgattgcggcgcagaacatcggggccagttgctgcttcttctactacgtcgggaccatcgagttccaggggcaccagagccaccaaccggagaagacagctgcggattgatagcgaccaatcgtccggggcagataacggaagcagcgacagtggaagcgaaattgaacaatccgcccggaagaagaaggccaagaagttcgtggaggatgacggtggcgaggcgggaccaagtggaacgcagcagcacgtcgtcaacgatagctccgagtgggaatccgactggaacagcgatgaggagcaggcattactgaatactggtggccaacaggcggctgcagccctggtcagtaagctgggctacgcttcggactcatccacgagcagcaacgaaagcgaaaaatgtcccatctgtttgctgtcgctgaccgacaaggagatcggtgtgccggaagtatgcgatcatatattctgcgcccgctgcatcgaggagtggtcgaagaatgtcaccacctgtccaatcgatcgcaaaaacttcgatgtcatcaacatctacaaaagcgtcgatcggaaacaattggtccgtaagaacgaagtccaggtgaaggcggcggatgaagtcccactcgttgaggatcatgagctgaccaattgcgaagtctgccgccgaccggatcgggaagattcgatgctgctgtgcgattcgtgcaatttgggttatcacatggattgcctgaatcctccactgacggaaatcccctccggatcgtggtactgcgattgctgttttgcttccggttccgacgaagacgatgaagaggttgaagatttgctaaacgacctcgacgagatcggaggagttcgtcaaacacgtctacgcatgcgtatcaatagtcctccaaggattgtccgtaccagacaaagtgaacgcattcgtgcaacaattcttactcgtacttcaactgccgtcagattgaatgttatggaagatctggatcaacccggtccttcgactagaaccagaagtggcacagtcggctcttcaactagagcgactgcagcgccggcaagaacagttcgcaggcgccgtaagcgtcgaacgcgaagaaagattttaagaatgatcatctcagagtacgatgtggacaacaacgatgagaagtttgctatcaaaagaaagaagatatacaacactcttaaaaagctaagcaagaaacgttctaaacgtaaacgtgcatctcacaaaagtaagacggctgaagtaacgcccggtttgaatgaagaaggagtagatctacagcgtcagcgtttcagcactggcattccaacgttgaagatctttggaggagccaacgacttggattacttctctgacgaaaatgctgacgatgacattgaggcggatgtttcgcttggtggtcgaggcgaaaccgccgtttccagcattcgagcaacacttcggaatcctctgggacgtagacgagttctgaaaagtggcttcgaagcaagctcaactagtggatcggttgacttgctcggcagtattatggagagtcaggaacgttggcattccaagaacgggctgggagatgtcaaaatcgataatggtaaaattatcttcaagaatgatagccctcaaaagaaagattcgaatcctccaggagctacccaagctggaattgggaacaactcgcaaggcagcgttagtgtaccagcatctagtactggggcggctgattccacaagttccaatcgtaatgggcaatctgccgaaaccgaaagtgcatctggattcgccgctacgagctcgacatcgggaggagcaggtggtggcaatgaggaaaacactgacagcgtcccagatccatcggatatgtccatctttgttgatctgccacctctgaagaatcctggtgatgaggatgaagatgaaaagaaaaagaagaaggactcgtttgacatgtttggatcggaacctattccactgccttctgcatctgcgtccgcatccaatctgccagcggtcaatcctgccccagaaagtactactgcggatgatggccctgccccaggcacatctaaaggatttggcaagttcaaatacacaatgacttcagaagcgaataactgcccgaatttttcggtttattcatcggaaactctccagtatgccaagactggtggcgaggaaccgtacgatccgttggacagtgaacaaaaaaccgatgatgagtttgaagaacgtgacgaggatttggttcagctggacgacgaagaacctgcagtgcagaagccacacgatactcccgctgaaccagatcaggagcacattccaaacggaacggataagcttccagttggcgatctggatcacgatgcgttcgattccgattccgaagacgagctgaaaaagattgaagaatcatccgctcccattggccccgaaccggaaccgaccaatgaactggaagcgttgacaccgcctctcactacaaccgtggctgctgctttggcctcctcagggacacaacctgtcacaacgactgctggactccagtcagaaacggtggttgtgggcgaagcaagcacaaccactaccagcgctgctccggctaactcggcccagggcgaagaggaccgcagctacactccttgcctggacgaaaagtaccaggaggctcgccgagaacaggacaagagtggaacaacgccaacacttccgccaccatctcagaaggaaggcattgatggcatggatacggaaatgatttccgatgaggatgaaaataccttcaaggaagatgaagcccggccaacatcggcatcgaagccatcatcttcgggtgctagaaagaaagatcttaccttcaagaaggtaaacaagaaaggaaaggaacgtaactatcgtgacaaagaaaccaagaaacgagacaggaatgacaatgacaaggaaaatcacgatcgccgttcgcgagagcgcaatcgccagcgtcgtcccaagaggaaggaactggaacgttatgatgtccgcacggtgattgagaaacgcccaagggtcatgaaggatcccttcggtagagatgttactccgagaccccgttccaagactcgcagtcgtagtcgcacccgtagccgtactccggaacgtcgcagggaattgtccatttcattgagtccagagcctccccgacgtttcaacagacgacgttcgccttctccaaggttcaggggaggaaggaatcgctcaccgttgccgttccgtagaaacgtatcaagatcggtatccagaggtcccagaatgcgatcggttagtagacaacgatcgagatctccggttgttgcacgaccacgcttgattacaagatccatttccagaacaccttcccctcctccacgtgctcgacttccacggtctgtttcgagaacgcccaaatcacgctcccgtacaccggacattcgaggagccaaaacaaagaagaccaagaaaaagaagcgtctagcttcggccagcagaagtcgcagtcccagtgtggatcgtggaaagaaaaagaacaagaaaggtcgcaaaaagaagaacaaacatcgcagccggtctcctggtggtaaaaagaaaaagaccaggaggaggtccgcatcacccatgatgtctcgatctcgctcgcgatcgacgtcgattcctccggcgcaaaccaccggagttttgaccgagagatttgccaaggtaaggcagcagaactcttggactcctccgccaccggtcagaccgaaaacaaacggtaccaatctgacggtaattctaacgaacgaagaagcattggctaaacaagcaaaggaacgcgagcgaaagcgcaaagaagctaggcgccgtgatcgggcacgtgacaaaaatctaccctcgaaggaagtatttacatcaggtgataatatattagttagtgttagttttaacgacaaaaatttgaataaagaaaatgaagcagccgctgaaggtgaagccgctgcgataacacaaaagagattgaaagacatggccaagaagcgagccgaagccgaaaaggccaagcgaaggcgtttggagcgattgaaaaagactcgcggcgaagctcccaagccagttgtaataatcgacctcgacagatcaccgttccgcgtaatgacgccttcgcccagagcggtaattgtcctaagtgacagcgataacgagaaggagaaaaaccgtcgggaagccgaggcaaatagagctggtgcggttggcaatcagcaagttaatgcagaatctagtactaatggaccgtcttcgtcgacgcgaaaatctcctgccgaacgacacgaagaagacatgtttggtccaaaaacacctcctggcttcccgagccaaccacagccctcgcagagcaaacctcaggcgccaaagttttccatgcaagtcaaatcgaaagcttcgaatattcgtcctatgaatctcctgtacgagccaggcgagctggatgaaggcaaaactccggagcggatggataatgctgaaagctcttacagtatggttggcccaaatacacctcccgaaccggctccacaatctccctcgccggatgtgtatgatccgttcgaacccacgaaatctccttctccgtcgccgccacgacgtgacaatgtctcgattgagcgcctttctgatctggacgatgctgttctcccatccagcagcggaaaaccagacggccccgactccggtactgtaggtgacccgaaggctgactcccaaaatcaagacgaagcaatgaatggtgaagccgaagcaccccgaggcaacaaaatcacaatccttagcaacattgtcattagtcaaccaaccaatagcgtatcgggcgtggtcagtggatccggtgtggtttctgccagccaaaacaacggcggagatgactcggatgtgatcttcgatgactttgtgtcatcttcggccccggttcccagcagtaatgttggttacagtagtggcaacgccaatcagtccaaccccattaaatcctacagcaccgcagcaaactcatcgagcctgatctcgaaactaccactgccaccgggagccactgccggacagaagttcaacgacttcatcaaccctaccgattcgccgtactctcccggggcaagtgatttcgacgatctgttcgaagcgggcggcgagttggattctccccctcccgcaccggtcaagcagtcctacaaacccacgaagattctttccaagggagccaagaagggtggcggcggcaccttcgataacctgtttggtggttcgcctgcgaataacttcaagcggggcaagaagagcgcacacaagcggaaagccaaggcgaagggtgacgatgaggaggatctttctaaattgtccacgaaggataggttccttaagaaattgaaccgactagaaagagtggtggaagaagtgaaacttgtcatcaaaccgttctacaacaagaagcaaatcaacaaggacgaatacaaggacattatgcgacgcgctgttccaaagatctgccacagccgcacaggggaaatcaacccgatcaagatccagaagctgatcaaggcgtacgtccggaaggttcgcggcaggcgacgattggccaagaaaggcggtcttcccggtggacccggtccgctgatggcgcccggtgcagcgaatccgattctcatctaagcgtggctacgcgaagaaagtttctgcaccagtacttcgaggagaagcaaagggtttccccttctttccgtaactccagcagcaatataatccaaccccatcaaacaaaccgaacacactcaatcatacacagcaacacataccctattcccgtactgactccacgggatggtagcatgaagaaacagtgcaagcaagtgaaaaatttggtaaaagtttccgtttttactttatttttaatctcgcgaggcgaacattttgatgaaaggggaaaatgtaaaggctaggcagtacagtcttgatgcatccgatcgcgtttgcgtccgttcagtggaagattgcatgaaatcttgtgaacagatttttctcctgttgtagaaaactgacacttttaggcaagaggacaaatgcaaatgattgtttaaaaaaataattgaacaaaattattgaataatgtgaagaacaagcatctacttgaagcgtaagaattccttatcgaatgaaacgactagttttttttttttgttgtatagagttaagtaaaaattagaacacaagatcatgcatcaaattcactcataattgtggtagaaagttgctacacaagaaagtctagtaaaaaagggtatttataacaattatcataataaatatttattgaatatacaacaattactagagttaaatgtaagtcgagtagattgtgctaattatagagaatattctcttattaaggtacagtatccgtgtaaagtttgtccaattacaatctagctattgtctgaagctaactaaattcacaaagccctgtttgttattccttcgatatggtcttctgaacatcaaaggctccgaagagccgactggaatgtgctattccagagggcaacacgtgcaaatataaaaaagatcttttccacagtcgtattgaaccacccttgcttgacgtgctactcagcgtcattcattcattttgatccgtaatcacacagagtcttcaccaagcaaacggccggcagttggtaaatctgtcgaagttaagcctacttattacagtagatgaacaacaagctaccaattcacacatcccatgcgaacgcgtccgttgatagatccaactgactaaaacagccgtcgtagggtttaggcgtaaggtttagcctatctaatactactacctactacaattaaaagtgagtaattttaaatttgtagtattgcctatgaggaacatatgaattcatctaaatacacaacagaggaaatgctaaataaaaatacatagtttaagaata

SEQ ID NO: 805 - DNA, 5145 bp, Aedes aegypti
tgttactattcatacactttttgtcataattctagttattttaacaacaccctgcatcaagtttgtaacgacctatgttcgaaaaaaaaccttctatcataataacatgtgctgatattatgttgttatgtatccttagtcgggaggtaaaagaactatcacttttgaagacacgtaaagatattctcacgagttttgtgaagacactccctggccagtggaccccctctccatcatcagcatgttcgagtagtacactgaggattactcacgacgattgtgctgaagcctgtgtagtagttgaaagtttattgataacgttgcgattcattaaaagctcgaagcgggattattagagttcgcttggggtatgtccataaactacgtcaactattcaaggagactgcgaagtgtgcgaagataactagatgttccgattctgatcttcggaatataaagatgaagctaatagttcatggataatccctaattgtttggtaatgcaataaagcgggattcattcattccattgaatcgaagttgtttaacgctggatgagtggtcagttaggaaaactgcgtcacttggagcgcacacacttgcactcgttcgctattctatcaatgatagggattttattggactgatgttaaatttgagaaaatggattctcagtggattttttatgatgtttgtaagctcagctttccaatgtcgactgaactcctgtccgcgtaagtacttcggattcaaatccagtgaggaaatattgtgacggattgacattcattcaattgaatatttcctatgtgccatcgaattgcttttaaatggtggagtagaactattgaatcatactttttgtgcttccatgtatttaagaaaacaggcaaaagcatttcattgaaacattttgatcagattgtctcaaaattgtactccatatatttcattgaagtaaagctctcatcaatcattgtaaattggctaattttcctaacacttttgtaatgcgttatttaacagttgatttaaggcatgtcgtaaattaatttcttactgtttccatgttactattctttatgtttcgcttttgcactactttacgtttaaagctgttacctaatccttaatgtaacactatttaattacaattgatctttttattcggtcgttaactgtagtcttgaattgttctctcaacaaaacgtaactaattctgtactatccttgtcgacgaatgggcaatttgttgtttcccaactcgaaacagccgtcacagagttcattcgcaagcctcgaatcaacggaacgcagcacatcaaagagggcgacacgatcgagttgacctgcctgttggacgttgccgatacggttaaatttgatatgaaatggaagctgcccaacaagcgtttggccgtcaataattcccgagtaaccgtcagtcggatgtcggtcacttcggacccagatcatccgggctacctggtgggtcaattgagtctaacgatcaacggagcattggtgagcgattccgggtactaccagtgtgaagtgaccgaccacaactcccactccaaccacaagtcggcccaagtgcacgtcgtcaaacaggccgacattggcttcatagagctgaccgacgacaacaagctcgacttcatcaacatcaccagcaagcgagacatcaaaatcgtgatcaagtacaaggccgttctccagccggagttctactggaccagagacgatcacccggaaccgctggaggccggcgaccactactcgatatcggaaaccaatcaacggattacgctcaccatcaagaagtcgaccatcttcgacacgggactgtacacgctgcatgcgcagaacgaactaaactacacgacctaccccatgaaggtgtacgtaagggataaacctgtcgtgtcgatcaacccgatccacgcccggcccggcgagaaggtcaccttcgtttgcaccgccatcgcgtatccccagccagcgatgcggtttgccttcatcccttgcacggaaactccctggaagaactgctccaagtcgctgcacaaagaacacgtcaaacactatggcaaacgtctggaggaaggtggtcaccagtcggacatcatcactaccgagcagtatgaaatgcaagccgaaaccgcagggtatgtcggatgcctggctgtgaacggctacggagaggactttgtgaaggccgatctgctgatcagtgacttgagcaaaccggttgtgatcgagaagctgtctcctgacgaggatgtcaccatcggcgatgaagtgacgatcgaatgcgccgcagtcgtttacaatcataccgatgcgattgacttcttccgcgatggtgtcctgttgagcgggttagctggaattaccatagagaaggactataaaacgttcgcctatcgaacgaagttgatcattcacagcgtcggcaaagagcatcaaggggtgattcgatgccaagcgcagttgatgaactcgaacgaattcgacgaagatgagctgatgctggaagtgtacgaaccaaccgctccagtaatcgtagacgaacatgtccacgaagaactggagatggagatcggtgagcggaacacgttctcttgcaatgtggagggaatgccgaaaccggtaattgagtggaccaaaaacgacgagtttgtaatgtttgataacgacaccttagtgttgctgcccaacggaagcatacacatgccgtttttgaaagtcgacctctccggtgactaccggtgcttggctaggaacaaagttgcccaggcggaaaagatttggagcctacgagtaaaaaccgtcacgatcaaaaagacctgggtatatcttatcatatccatgatactcgcattggtcatcgcagtcgtgctcatctcaatgttctactgtaagaaaaagaaggaactgaaggcgatgaaggcagctggaattgaggacttcgacaaaggtaatgtagagcagatgaatccggagctagcgttggacgagcaagcggatttgcttccgtacaagagtgagtacgagttcccgaaggagaagctgaagttgggcaaacagttgggagctggggcgtttggtgtggtgatgaaggccatcgcttccgggatcatggtcaacgaggacgaaactgtggtggccgttaagatggtgaagaagcaaacagacaatgaagtgatgcgggcgttgatttcagaactgaaaatcatggttcatctgggtcagcatttgaacgtggtgaatctgctgggagccgttacgaagaacatcgccaaaagagagctgatggttattgtggagtactgtcgctttggaaatgtccagaactttctgttgaaacatcggccttacttcatagatcaggtcaataccgagactggtgaaatcgactcgactatcgacacgaacaagcttcggtggtcagctgcgggctatacttacaacagtaattcgactgcctacccaaagaaccacctaaattccaagggttacgtgagacactccggtatccagaatatggccatggtcgatagctgtaacactgaagcgacaatcatgacttccgtagacggttacgacctgaacacagccgacaccgcaaacaacacagtgaactccgggaactccaatgagccactctggagatcaaattacggcatggactacaaaggtcctgctagagccgtaaccactacggacttggtatgctgggcatctcaggtggccagtggtatggaatatcttggctccaggagggtcctccatggagatctggcggcccgtaatatactcctctgcgatgacaatgtggtcaaaatctgcgactttggtctcgctcgatcaatgtacaagagcgaaaactacaagaagaaaggagaagctcctctgccattcaagtggctagcgttggaatgcattagcgataacgtcttcggcacctactcggacgtgtgggcttacggtatcgtgttgtgggaattcttctcactggcacgggtgccctatccaggtatggaagccaaccaagaactgtacaacaaactgcgcgacgggtatcgcatggataagccacagtacgccaatcaggacatttacgatatcatgctaaattgctggaatgtgaagcccgattcacgaccttcgtttaaagatctgaagagccggttcaacgccatgctgccggaggaaatgcgaaatcattatatcgatctcaacgaaccatacttggctatgaatgccgagaaggatcagcgaggagaacccgactacctggctagtttaggaccgccagaaggacaggcacccaaagctccgccaaactacgtcaatggaatcatcctccccttacctccaatttctgacaagccggactatctccaaatgaccaagtccgactcggatgacatccacttcgattttgcctcgttcaacaacagccaaccgtccccgacgctgaagaacaacctggactccagtccgcagcagggcagcaaacgccacaagaagaaggccatcccggaggagatcccgatgctgcagaaccgttccggcggtagccatgggttcaactctgactcggaaacggaagcgaccagtccggtgccgatggttcgcacaactaagcttgtacatccggagcacgagtacaccaatgtgaaacttctggacaagccgagtggcaacggacacagcgcgaccaccaatgggaccgattcggatgcgttcagtaatcccgggtatgtggtggtccatgcacccaacgaaaagagattgaagtagattttaggcgtcactccccgggacgggaaggttttacttatcttggactgagatcgaggacggatgtcgaacgtacgcttgagtgtgctttgaaaagatgaagtattttaatagagcgatgcaatctatttactacttgtgggagagtgtgtgggtcttgtgtgtatgtgaaacgaatggtttacggacaagagtgattatttcacactcgctgcgagtggggaaagcttttaaaaatgttttctctcatattaatgccttaaatgttttagaaactattggatattttactattatagtatataataattatgtgtaaattattcgatcttt

SEQ ID NO: 806 - DNA, 4301 bp, Aedes aegypti
atgaagatcatggacaggggaagttgttggttcgatacacggccaccatccatcgtattaaacaagcgcagtatgcacgttatggaagagggcagcgatgcgctcgtctgctccgatgccgccaagatagtcagtctcaagtcgaccgtcagcagcgtgggggtgagaacggctcctgaggaagctacaaccattaaggatcacaaatccaaggaagaacaaacggttactcctaacgaagtacagcggaaagaaagagaggaagcagtggtgacatccggtgatgccgcgaaagttgtgagtgagcataagaaggacgatgaaaacaaggaaaacatgacagtaaaagataacgcaaaggaagaacaccgtcgggtggaagcagaagagaaagtgaaaaccagagacgaagaaagcattgataagaaagaccgggaagaggaagatggcatagcagaggatatcatggacagtattgatgatattgtcgcagatgcaaagaagcaaaatggctccaggagtgctgtcgacttgtcatcgtcatatgacaccaacaagagtgatcaacagacagatgactcggatgctgtggaaactatcgacagttctccggaaaaggacatgagcaaattcgagaaacctgcacggaagccagaaccacttcaattggacaataaaaattcgtccgacagtcggactagcagcactgaaaaccagatcgtcgtcaaaaaagaagtcgaggatgattccgaggataatcaagaaccaactacagcaagcgcgaaaaagtctagtcctagccgaacagaaaagcaatcagagaaatcacgagaagcggatactgtttctcgtaaacgtcgtcgttctgtagaacaagatgaagcagaagatggcgatgaacccctagttccttctaaaaagcttaagcgagagttggaaactaattacccaacgcatgatcgactgctgaaagagtacatcgaaaccacttccaatcattcggtggatgacatccagaagcacaccgatgccctaacggtcgaaattcagaccttaaacgaaatgattcgtgccaaagaaatcgaatggaacaacatgatccatttgaaaaaagtaaaagaagagatcctactccggcttacgcggaaaaaacatgtcatggatgttatgcataccaagctgggagaagtctctgagtattcccacttcgattcgtcaaaccttaccaacgtgcgatcggcctctgtggggccacgtcccccaacacctccgccagaggttgatattcgtcccgcttccgtgacaccgatgcacagcagcactctcaacaatagcaaaaatgctaacgtttcaatcaattcgatctccggcagtcggcaaattcccggcagcaaagataacagtctgtttgctcagttcaatcacagcaacagctccgtaacaatggtgccattgtcaacgtcctcctcgttgatcacatccacgaatacaattctgcaatctcgggctaacatgaagtcctccgaagtagccaaggaaaagcccaatgctgcccaaatccagcggcagattcttcccaaaccggtgctttccaaccaccagcagatcctgaacaacttggccatgtctgctggtcttacagccgctggcaccactagttcaggtgctacgtcgatctcaaactcttccaccacggctactgttgccagtgccgctaatcttcttgccggattgtccaataacatccttgcggggttgtccgctcaaactgccgctcttctaaatggccaccaccacccatccgcatccaaccatctcagccaagcacaagccaatcagctgcaagtgggtcgacaaggcgtcatcaaagacgttaaaagtattatcgctgactatcggcagaagcatccggagcaggtgcctcgtcgagggcgccgcctgaagaatattcctacatctggttacgaaggcatcactatcaccaataagagcggatcatcgcgaatgccagaacttggattcctactaggagagaactcccgtccctctagcaacgattcgtcccaaagcaattccaacaaccagctgccctttgctggtggtctatcaacctcacccgcggccggtttttccatcagcgatgtcctagcgcagtttgccaaaatgagccaaaccgatcgcaacttgctgtcgaatctaacggccgccgcagcagcagccgcagccgcagctagcagcgcagctaccgcaacctcatccactactacccattcttcatcttcttcccaccaacagcagcagcaacaatcccaacaaaactccgttgcttccaatctgagtaaaaattcatacccggaagtgaccctgcacccggtgatgaattccagctccgcaaccggttccaatgctgaccagaatcacagcaccggaagcaattccggcagtggcgttaatcagtcgcaaaacaccagcagcaatgccaactcgaccaactcgctgctgcacggcattctgaccaagtcgtcctcccgtcccaatgcggccggtttcacgtcgttttcgcccacgttggcccgcctgttgacggcaccggaacggatgaactcgcaggccgctaccgtgacgtccggtgcgttggccaacctgcaggccaacaccggcctgaatctttccaagtcgaacagtgaaatcacgatcactccggtggtggcctcgaacctccagcagtccctgttggctcaccagcaacagctacatgaacagcagaagcagctgcagcggttgcgggagcagcatttcatgagcatggacgacgaagccgacgatagcgtggatcgcttggtgatcgatgagggtgacgatcatcaccaccacggaacggcaaacagttcgcgtaacgagggccatcgcgaatcgggtgtagttattacgacccgcggaggcaacgggcccgagttccacgaaaacgaagtgccagaatgccagggctgcaagaagcgagaggcccagttcgtgtgcgccggctgtggcaaccagtggtactgcagtcgggagtgtcaggtgaacgcctgggatgatcattcggaagtatgcaccggttaaagaagcaccgcaagcatcagagttcaaagttcctgatgaccaggtattactttacttttttatctgaaatgaccattgaattcaactagacaagagacattcaaccggcaagcaagctatagctaactaagagaataaagtgcagcagtggctgacgctgcaccgtcagttatcagtatgaaacgacatgttcttaaattttaccaaactatttcttctattctatagccaatcatagcttaactccctttgagacaactctttcaaacacaaactctacgaatgcaaatcttgacacatgatcctaaatcaccagaaaaaagttcaatttctccattttgataggttcctctgcacggagattcaaactcccagcatagatttaaaatcaaaacttatttatacaaacaggacatcaaaattcaccactagcaaataagttgcattttgtgtcaaacaggcataacaacctttgaattgtacatcgatatctccattcagtttatttcctagttttacgaaatttttaatttttgctagaatccttggttgaacaagtgaatcgtagatatctttagtgttgtgtaggaaaactaacaaccacaatcatctgtattcgccgagaacgaatagtaaccagcagtgtaagattctaacagctaatgaaaaaaaaagaaaagatggaatagagtaaagacgccgcctgccacagagtgcgctgcattcccccacatggcaatacagttcactaaatggtaaatttaacactaacatttaatcaaacgcatatatttacctatcactattgaataattagaagatgcacactgactaaaagtgaattgctaataaatctgataaataacaaaaaaaagatctagacttgcgctgcgagagggtaagaaatacccccgaatagagcaaaagagtaagattacagaagcattgtaacttatcgcggaaatagtacgtatagttgtcaccgtaggtttttttttctcaagaaaatgtaagatggtttaaaaaagtaataaaatgaaagcgagtaataaacgtgagtatgtcaactgagagcgcagtcgtctaaaaacctagacttaggatcgaggatcagtatgtatggatcggaggagatgcagcacttagtaggtgttaatttcaacagaataaaacactgcaagagaaaaatgattagtaag

SEQ ID NO: 807 - DNA, 732 bp, Aedes aegypti
gttggatccacttctgtcaacatcactcagtcgatcttctgggttgatgaaaacgacaagcgctcacacttgctagatctactatcgaacatcaaagcacagaacgaaggcgacgagaaagactgtctaacgcttatcttcgtggaaaccaagaaatccgctgattcgttggaagaatttctttatcactacaaccaccctgtcaccagcattcatggtgatcgtacccagaaggaacgagaagacgcactcaagtgtttccgctctggacgatgcccggttctggttgcaacggcagtggcagcccgtggcttggatataccgaacgtcaaacatgttatcaactttgatttgccagccgaaatcgaagagtacgtgcaccgtattggtcgtaccggacgtatgggtaacctgggtattgctaccagcttcttcaacgataaaaaccgcaatgtggccaatggattagttagactgctacaggaaacccagcaggagattccgtcattcctggaagatatgaccagtgatcgctcgtggggaagccgtggacgtggaggtggcggccgcaatcagcgttatggaggatccagctctacgttcggttccagggattaccgtcaacaaagtagccgtggcaatacccgcgatcagcgaagcggaggtggcggcggccgaagcggtggttatggcggaggtggtggcggctatggtcgtgacgaaggaagctac

SEQ ID NO: 808 - DNA, 1795 bp, Aedes aegypti
atgcattttattgcttcccgaccccagacatcaaatggaatcgataggatgaccaccagcacccccgcccaagcggctgccaccctgccaggagctggaggaaagcataccgtctcttcggcgcccacttctccggccaaagcaggcaccaaccttaccaccagcaccagtttcagcgaacggaacaaacgtttcgaaatggccaacaccaaccgattgaacaaatccttcctaaagccccccgcagcaaccgactacggcttgaatggcactaagcaccactccgaatcgaccccggtttcgccggcgctgtcatccgcttcgcaatccctcagcgcggccaccctcagcggaagctccccgtacgacgtcaaccgaacccaggacaagaagccacggaacatcttcggaacactgcgcaacaagctgtcgctctcgaaaaagtccaaatccctggagaactcccagtacagtccgacgcacgtgcagatcatagcgctcgtcgacgctcagccgcggttcctcgatggatcagccctctcgcggaagtcttccatttccgaatcgtctgccgtgtcgggaatttcgaatgccagtgggcggaccttcgtccacgaggagtccacgctgctgctagaaacgttggagaacaacatcctgcggcattacctggtaccaatcgaagtcgccctgcggcagaaggcctggaagcgcaagggcgtcaagctgcacatctacaatgatcacacattcatcgctaagcatattaagggcggagtcctatgccacgtgtgtaaccgcagcatcctgcgccgtcccggaaaacagggctacgaatgccgcgactgtctcatccagtgccacaaaccatgccacgtgcgaacccctcaggcctgcccgaatccgaaaattctttcggttcagctgttaaaatggccagcccagggcgtttgaaatggacagtttattctaaactcgagcatttaagagcggagcacaagtcaaacgaatcatcactagagcttttgttaattttactgtcagacgtttagaagaaaaaaaaaactactttcacaaaactcgcctaatgttatacacaaacacacaatcgcagccacgtttttatgacgaggcaacgctttagccatttctctagaaatctcttgaaaatcagactaatcgaaaaaaaaaattgaaccaaaactatcggaataccttccagacatgacaattcagtataaatagcgtgaattaaaactgtttaacgagaataaaagccttaaatcggtgataggacataaaatcacggaacacgttctatttattgtcatccattgatgaactaggcggttcagataaggaacacactctaatcatttagaaggttgtgagaaacgttgtcgtaaggaaccaaatacttatttaacaaacaaaataacgccaatcaaagcaagccgagttgccgaggaaacggtcctaagcattgatatgggcgcaacattgctaacattattccggccgctgcgttcacttactaccacatatatttactaaaaaaagttaccttttacaccataaaacgtttttgctggagttgttgagaaagtcataattgttaaggtgcaaacaaataacggacccgttgttaaagatacaaaaaatgtataagttgaaaggagaccatacgcattacggagcagcatagggattattattcgttaagaaaaatggtagcatataggtgaaacaaatgatttcgagaacgaagtgcaattggtaaagtgatttaattgaa

SEQ ID NO: 809 - DNA, 555 bp, Aedes aegypti
atgccaatcgacatcgttcgcctcacgtggaccgaaaccgacggtcccgctcgttcgacaacagtggcagtagcaatcgccggggaagatccacggaacgtgaacggcgacgatcaccacgaagtggccgttctccggatagacgtcgaacgcccgaggaaaaacacggcgacaaacgggaacgcgaacaggatcgtgatcgtgaacgtgacagagatcgggatcgagaacgtgatcgtgatcgcgatcgggagcgcgatcgcaacggaaggcgtaggaatcgttccagttcgtacagctccagtggatccagatcttattcgagatctaattgcagatcacccgcaacaaagcgtggaaagtctccgaaaaggcgttcgaggagcccctaccgagagcgtcgttcgaaaagccgatcgaagtcgttcgacgacagaagacacggtaaacacggcaaggacagacgagaggaacgtcgcgatgaacatcgtggcgagtatcgtgacaacagagaaagatcacccggatacaactctcattatcaaaggtacgtga

SEQ ID NO: 810 - DNA, 2954 bp, Aedes aegypti
tcccgtgtcgccttaagtaacacaatctgatttcaaccctgcaagagaaaggcaggttgctctcacccctgccggttccagtcagctgtttttgtttcgttccactttcccatccgttcctctcattgacagatctctgaaaccagagtgcaccgctggaagaaaaacagctgtgttttttcactcccaacaagcattttgcatccttctggtgctcgttcaaaaaatgctttgaattttctcaaaatcgtggaaattattccgaaagtgtttttcgttgtgttattagtgtattcctccttctgttaaccgtgtcaagtgctcaaataaggccacaaaatgatgggttgttgtggctgctgctcggccctgcggcctcgctacaagcgcctggttgacaacatcttcccggtcaatccggaagacggactggtcaaatcgaacatggaaaagttgacgttctactcgttgcgatcgccggagaagctggacaggattggggagtacttgtaccaacgggcctcgaaggacatcaaccggaagcggtacaagttcgtggagattgccatggaggcgatggatttgctgctgatggcttgccatgcgcagattctgaacctgtttgtggagagcttcttgcggatggtgcagaagctgatggaggatgtgaatccgacattgcagattatggccacgaattcgttcgtgcggtttgcgaatattgaggaggacacgccttcctatcacagaaggtacgatttcttcatctcgaagttcagttccatgtgctacgggaataacgacgatttggagctacgggacagtattcggatggccggaatcaagggattgcagggcgtgatccggaaaacggtgtcagacgatttggtggagaacatttgggagaagcagcacatggagaagattgttccgtcgttgctgtataatatgcaatcgtcgagtggaagcaaaatcgtggaccaggaagcgactccttcgacgccaccggttctggcagaggccgtgctcagagagttggtttcgagggcttcctttggacatatcagagcagtgctgaagccactgttgatgcatttagataatcacaagctgtgggtgccgaatcggttcgcaatcgacaccttccggatcgtaatgatctccattcagccacagtattcatacacggtcgttgaaactctaatgtcccatctggatcagaatctagcatcgtcaccaaagacacgaacttccctcgcggttgtcctttccaagatcatcgccatcgcagcgggcgaaagcgttggaccatccgccttggacatcatcaacaatctcctaacgcatctcaagacttcggtcagcacccagcacgaatccacaccggaagagacccaataccaggaagcattgatcaacgccctcggcgagttcgccaatcaccatcccgactaccagaagatagaaattatgctcttcatcatgaacaccgttccggacccctcgaagaagaacaagggcgatcagctcctccaaaacatccttctcaaatcgctgctcaaagtcggaacccagtatcgcaccgtgtctttcgaaaaagctttccccgtctccttcctgcaaccactgctcaaaatggctcgggcttcctcggttgcgatccgggtgatagtcatgcaaatcttccagcaactgctcgatcgccaccaaaatcagcaccttctgaacatgatctccgtcaccaattatccgacgctgacggtggagcaagcgtcccgatcggatatccttttcacgcacaagcacgggtcgaacattctgcaggccattctggacggaatgtcccaggagaaccatatggaagtgttgaagtcgtcgtacaataccgctggcctgatggtggtggagatggcttgcagcgaaacggtgcaggagtttctgctatttgtgttgagcgtccaacaggtggccgtagccgaagtggaattatcgcctaaacaccgctgtaacttgcatagcattgccatttcgatactgatcctgattggccgctgtaccggcatcggaccgcttgtggaatacgccgaaaaagtcatccaatctcgtacggaagatgcaccgtatctgttgccaccgttgctggacaatgagaaacccgcacctagcaccctgaacaccaatcagccccatctgatgatagacaagttggccgtggcggagtgtctccaacaggccggtctggaacataaccgagttcagacgggaactccttactccctgaaccaaacggacatgtccgctcatcgccactcgtgggtcgacaccagtgccccccgcaacagcattgttgacgccaactacgacgccgaatcggtcagcagttcgcccggagtccaaaagcgcagtcttccggtggacttcaacttcgagtcgatgaagcgggtcctggcggaaccgaccgaggccaacaagcgggaagcccgggagaagcaagcggccatcggacgcacgttccgcgagacggccttcgaagatttggtccgccggacggaaccgcagcatgacgtgctgcagaacaagctgaacgaaatcttcaactcgctgtcggccgaacggcagatcaactgcggcaaccagctgatgacggcggccggggcaaccgtggtggacggggccaacagcaagatgaaccagcaacggccaatctacgagaataacttcccggaattgttcttctattaggaggggggttgtggtgggagggcgatggatgaccttggtagaggaatattgttttaattttgttatcttttgtggtgtatttattgctgttagctagtcggggatgggctgggattgaaagcgtatataagatattagacgttggaaggagcattatcagacactccgataaatttcacacaataaagtattctatgcttaatatcttaaaa

SEQ ID NO: 811 - DNA, 16449 bp, Aedes aegypti
gtcgtttcagggcagtgtagttttttcacaaaagaaaaccaagatggctgcacattcaggaggagtagattgggctgccgttttaaagccgtttttaggcagttcaagtgaaaatgttagcaaaaacgatgtgctcagtttagtgaaaaccatcatccaaagtgaaaatgaaattctcgaccatgacgccggccacaagcagtttttcgacagctttgtcgtgttggcagcagaaaatctcaccaaccaagtcacgtcactttcgcaaacacagcttccgcaaattgccgaagcggccaccgtcctgattcgctacatcctgcaacatctggacacgcaagcaccgaacaagcccagcattctgctgatggctctcaaagttctatgcgaaggccgcaaggaatcggaacattcgacaagcaacacatcggcctcgtccattatctccgcgtccggaatgaaatatctgaagtatccggaagtgcacggcaaatcgccctcggtgggcagtggcggtggaccgtccggtgtcgttgtaagttccggcggaagcggatcggagaaagaaagccccaaaagcgaaatgaaacgctcgcggtcggatctatcgaccgtaatcctgcaacagctcaccactccgctcggtgctggagtgttcacatttgctgcactcagcgaggagcaaatcgattgcacggaacttttcgtcaaatcaaacctacaatgtctacaagccaccaacggaggagatctgctcttcaagtggtgtaccaactccttgcccacgttggctaagtaccgcacaaagtatgaggaatgcaccgttcaaggaaaacccctatacctaccgattacaactgtggaagccggagctgtcaaagccaacctttcacacatcgaatcagatatttccaacatgctgctcgcggtttcgttgccacttgttgaaccactgaccccgaccaagattgcacttctctcccagtgtgctatgtccgccttgtattgcgccgttctaacgtcaacagcgatcagcgttttggcaatggccgctagtggttcgcagaaaagtgcgtcatccacacaactgcagcagaaggaacaacaatcgtcaagcaatcagtcacagaaggaaagcgatgatgaagaagattacgcccgaattgtggtggatcgcgctttggagatattcaccaagattggtaccattttgaaaaactccacccgaactcatatttatcagaatcacgtctgtatgggagcatggttgttgatatccggaatccaaggaaccatgggcgcttctggaaatcccagtggcagcactgtccaacagacggcttctgtaaaaacttccgaagaaagcttgaaaggaagaagccctttgaaaacgctcgacgtgccccaaatggcctcaacggcagcaccgacgcctgctttacgtgtgaatctgttcaaagttcaacaaggcttcggagtacttaacgcggcaattgctcgacacagtatcacgctcctgactgagctgatcgatgatttgaagattgactcacgttcagacgatgaggaatacagtagcattgagtctgcaggattcgacatcctcggccaatatacatccatacaaagagtcgttcgcgttttgaacagcgccaccttacaacaactaatgaccttcttggcgactgtatcatatcgaaaggcatgtaccctgcgtagaataaacaccaagaacacgaacgaaggtgaacccatgagttacagcgactcgacgacgtattacaatgatactttctcatgttccgaagaaagcgaaccggaggaggaagacagcgacagctacctgggcctttggttcaaggaaacactttctcctgaagccaatgaagaaatgaccgaatcacaggagcaggagaagaaagacgaaaagcgtcacggaagcaaccttgttccagccaaggacgaaccacacgaatatctcaacttgagttctttgattttcaacttctttgacacgtcgcttggcggtcatcatatctatctgaatcgctacgtgagaaccggtctaagcgagcaacagatggtgttacttgctaacattctccgtgatcttgatcgcgactcggctcgaggtgatccagaaaactccggctgcctccagtggcaaaacgccatggtcaaattctccggtgcagttggacgttatctccacaatttaatatccaactccttgctaaacgaatcgctgcaatcagctcttctgcttcatctcggtgtttcaccatggactcaggattccaacatctggccgcttcaggtttactccagaacattagccgtgctcgttcagatacttctgctgaaaccatcgcaagaaaaggaagcagcttgcctctcagtttggcatcgcctagtgaacacacttgtcgaaggagtctgttcaaaccagatgatcccgacggaatccgaaatcgaagatctcaacgtagagcatgcacaactgctactgtttttgttccactccctgaaccttatgcagaagaaatccatcttactgcttactgccggaggtgtgattcgttgctccgaagtttgtcgctccgtaactccagagaagccgttacgtgaccaccaaattatgcttttatcgagattgttgctgttcctggaatatctcatgaaacacttgtacaatcctccgaacgtgctgctcgagcaggtccgttggaaccttttcagcgtgttcacattggattccgagcaaaaaattgccgatctcatcaattataaaaccaaaatgatgtccttctgccgcaaagacatcgaagacaagcaccgcaagctggccaatgaattcagcgtcagcggagtcaagccgaagttctactcgttgaccacggtagacacgaaaattcaacaggaattcaaactagacggtctggcgtggaatttcatcttgtgcactccggacaagctcaaatacccctggttgatcgacgcgctcatcgacattctcagcatcacggatatgtgcctggcgaaaattcccttccaaacgctctgtgcggtgcactactgcttcagtctgtgctggaagctgttactcggactgccaccttcgacgcagcatgtggaggctctgatgcaggaaaaggttcccaatttgcactcgctgttgtggtcgatccgctgcttgcatccgatcacccattcgcactatctgattgttaacagtttggtcaaacagggcatgtatacacaatcggcggaggcgctgtggaatcgtcttacggaccatgtatcagatatgaagtacagcttgaagctaacggtgcttggtctggaatcttttgctagctcgttcaatccggagcaaccacgtctgtccaagattatcctactggacagcttagtatcgcatctttacgccatctgttgggccgaaaaggaaggggtcaacattaaaaccaaatcgacgaataacagcagcagctcgtccagcagtaccagcagcagcagttcaaccagcagcaacagcagctcgacgtcgtccagctccaacgctagcgattctagtgtggctagcggaggacaacaactcaccgttacaactggagcagctacaaccgccgatgcttccagcaccactggcccgggaatggaaacggtcaagatggcatctaggaatgatctcactcgtaatttgatgtcaaagttgatggaagttctcgagatagtgaaggaagcaacctacaagacgatgttccagaatctgagtggacagattcctgcttcactgattgagccactgatcgccatatgtggttcgaagaacacattctgtcaagatttatccggccaactggtggccttgatcactggtcaggacaaggacgtaatctctgtggaatggcgtaagaatcttactataggtagtgaggacaactttaccagtggatcattccctgttgaagtgcacaccttaactgtcatcgatggccatttgacggaaacatcgaagcacctgtcctattcgatcctactgtcactgaagcacgctttgaagtcatgcgtcaacttaatttactacatgctaccgaactacgacgacaaacagctcgacgaagagctaaaagagattcttatccctatgatttttgatcttcgggcagaatatctgtatgatgtggtcaacaaatgtctggaatcactgctaggtggtgattcgaattcggaaacctatcaactgttggcatattcaaacattcttcgtcgtagttatcaatttttgatcgaatacacggaattatccgcccaaggacaaacagttaacattgacgaaactgtacttcacaacatcatcaaattctgggaaacgatgttggataaaaccatcggactgaaagccatgcgagagttcttctacgagagcaaaaagggcaatctggtgcaaattttgctctcattcacgggcacgaacctgtcccagaagtattcaacaaaagttcttcaattcttcgagaaattattcgccgcttcggagaaactcgatgcccaattcgacgaggaagaagtgagtagctgcattgctgaacttgtgaacgccgatgcaccgaaactcaaaagctggttgagtcacattctgctcggtcctagaggagccagcctaaccactgggggatcgaatgcatcaagtaacgtaccaaccccaaccaacatggcgaccgtgtcggcgattccgagcatcactgatcaattggccgtttcagccacttctgataacaataccgccaacaatgcttcggtgggaggcgatccggatgccatggacattgattacgagtgcatggctatgccctggcagagggagatgagtcgtaccggaaacgataccgtagatgaagctctggagaaaaacggcaaacttttgcaagctttggtaaaatacattgtcgcagagaacagaatcgcacagtctgtctctgaatctctgttccaggctttgattcaaatcggacacaatttgctatgtcccgttcaagaagctatcgagtttgccgatttgctgcaggtcatgattacattggctgacgctggaaaaggccgtggccacgcaatgctgtttacggcagctatcgattggctggagatctccaagaatcaagtactggaaggtaaatcatccaaaagtggatcaaaggctgcggttcaactggagaatgtaactgccattttgaaatacatgagcgatctgctgcaaggtttgggatcaaatggaagccgttctatcaatcctccatgggacgacgaaacaccacttgatgcggaagatattctggatgatctcggaggcgatgacgatgatagtgctgtagaagattctgacgaagacagtctcagcaataagctttgcactttctcgataacccagaaagattttatgaatcagcactggtactactgtcacacatgcaaaatggttgacggcgttggtgtctgttctgtttgcgcccgagtttgtcacaaaaaccacgacatcagctatgctaagtatggcaacttcttctgtgactgcggggcaaaggaagatggatcttgccaagccttgtcacgaagaagtaattcagggcatggcgaagattcgattctgggatcagcgatgccaagatcatccgatgctgattctgtcttgttgacaagttcattgagacgtagagcatcaagcccaaccggacaaccgaaccagcctggaatcagtcaaatgtccgaaaaggaacaactgctggcgaaaatcatcgaaagctccaaggaagctttaagcaatcccgatcaatggaaagtcgttgtaaagagtattttgtcgttcttcaactcgataatgccaacgatcaaggatcactgcgccaaatattccacagtgggatgtcatcttcgcgctcgcaacgctttagaacgtctgcatcaaccagaaaagtcatactccttcagtgatcagattatggtcgccacccttgggtcgcaagaaggagcattcgagaatgtccggatgaatttctccggagagcaagggcaaaccatcaaacagttgttatcaacaaacctggtacgtcgtgtagccttgtgttgcctggcttctccacatggcaaacgtcaacaactagccgtgtcacatgaaaaaggcaaggtcaccattttacaactatctgcattgctgaagcaagccgacgccgcgaaaaagaaacttacccttacgagacttgcatctgcgccgattccatgcacggtcttgtcattggcgtccaatcccgcgaatgaagatttccttgcagtttgtggattgaaagaatgtcatatcctcacgttcaccagcactggagctacaaacgaacacattgttctaacgccccaacttgaaaccggaaatttcatcaagcgagccatctggctaccatgctcacaaaccaaactggccttggttacagcagatttcgttaagatctacgatctggcagaagatagctacagtccacagtactatttcctcgtgccgagcggtaagatcagagattgcacgtttgtgcatcaagaagacacatattacatgttgatcatgtcctctcacggatatatctacacacaacctctaactgacgaaagtctggccaagcatggtccattctacgtcaccagcactctcgaactggaccatccctcaataaccgatgacaacggacaaatcttggccggaggagtctcgatttattattctcacgtcctacagatgttgttcttcagctacgtggctggtcgaaactttatggcgccactaacgaacgttaatcaaggcgtcaaatgcgtgatcaacctgatctgcaatcctgcgtcgaaagttttctccaaatcgttgacgcaacccttgtgtcagtggaccgaaattcccggacatccaggcctcatctgtgcgatgatgcaaaatctgaacaatccggtcattttcatgatcaaaccagacggttacgttgcccaagagatcaaggcacagaacgcgaaggccaaaatcatggacatggtagccattcgtcattcggtatccggggtggagaagaccactttgattctgttgtgtgaggatggaagtctgcgaatctacgctgctcatcctgaaaacaccggctactggttatcgccggaaattcaacctataggccaccaattccagacaggggcttactcaaagtctagaaaatcgaagaagtcaagcaagcaaagcagtggaaatcaagcaagtggcaagagtggagtgggatccgctccaactttcccgatcgatttcttcgagcactgtaccctgatgaacgaggtcgagtatggaggaaacgatttgctgcagatctacaatacccaacacttgaaacatcgccttaattccaccgggttgtatgttacttctacccgggccagtggattcacactggatgtcatgaataacgatcccaacatggttatgacaggaatccgcatttccatcgggtcacaagacgtcagcaaagctccgcagagcgttactatacttggacgtgttgtgccaacggttgcaactcgtgcccgttggtttgatatcccgatgaccagggaagagagcctccaaagcgataagaagcttagcatactttttggaccctcgcaggatgcggaaaatatcactattctggacagtatcaaaatctacggtaaaacaaaggacgtatttggttggccagaagaaacggaagatgtgggttcatcgcagttgaactcggcaactcaaacgccgggacaaatggcaaattcgctgaatggcggtgataacggtgatggaaatggtggctcaagtttgatgatcactccgctggacaagatggtatccacgatgcttcaagtgctggacagtggattgtctctgctgggcggaccaaccggcgatgagggttgcaaacaggctgccgtcgatgttgccacttccctagtcttgtatcccacaaccaacatggttcaacaagacgctcgcaatgtgcttgtcacatgccatccaaataagacagcataccatgcttacaaggacaaagaaatacttgcagatatcaacgctcagctcaaaaagatggccgatgccagagactacaaatttatcgatccagaagcattctatcgagtggttctgatgactcgtagcatcgccatacagagaccacaagcactcactaagatttgctccgagaatcaattcccaatcttgcaacagctaatgcaactgatgaaggacttgtataaaatcacgcctgcctacgaggaacctttggcaattgtgaaacaaggtctgtcgcatgttgaagccgttgtttactcactagtagagattatctacgcatttgcactgtccgatagcgaaatgattgagtcgatggccaagttcttcgtcgagctgctgttggatcctgcaccgatcataagccatagtgcaaaacaggcgatgattcgccttctgagaccgaaaattcgacgtcgtaaagtgctcatcgaaagcccaccggtttgctcaactcctactccatcgacggtgacctcgattgtagccgggccttcaacatctgctggaccatcatcgtcggccggtgctgtaggaggatccgtagcatcaggatccagtggtcttgctgttggtggtgctgctgcaaacgaggaattcgcaggagcaatgcaagaagtagatgccatagaatcccttggtctggagccatccggtggaaatcaggccttggcatcattggaggctttgttaggagtgggtttcccgcatttgctggaagctcctgacgcagacgatgaaaccattatggaaatagctatcgcattgagtttgcaagacaacgagacggatttggctgctttgcagcaaagtatcgcccaataccagggcagaaatcgcaaccaagctcaaggactgccagcggcgattgcgggaggttcttcattcaacgttgagtccaacgcttcaggtggtggttccgatgatgatgaaatatcgaacgttgctacagaaggttcaacattgcgaacatccccagctggagaacacgccggaagtggtagcggtggatcggaaagtggttgtagcggagttgaaagcattggtggaacatcaggaagaagctcaacctatgaagagcaaccgaatccatctcctccaaggacctccggggttgatcaaattccaccacaaccggtggctcctccagaaactgaagaaaccggaggtgaaaatgcttgcaaactgcacgtgctaaggtactctatcctgaacaaactcgttgataacttcgccacattggacacagttaacggctcgcaatgtattccatttatgcaagttattctgatgttgacttccgatttggacggaagtcaagaagctgaccaacaagtgatgaatcgcttactgcaagcattgattgaccgtctcgagatacccactacgaaaacctaccagatgtcgaatcgcacatcgaaaaccgaagtgcaactcatcattcttcgcctggtcggagtactaatgggtaaggtgaaatcaaaatcgtcgtcatcatctgctgcgggcggatcttcatccgttgtaagccaagccgttctcgacaatgcttccttcgtagcacaagcaactgccaacgctctgatgaagaacaatgcgattccatactgtctgatgattatggagtccttcctccctcactggaagaatgttgccaacaatgaagaacttctttccggcacgaccacggctaacaccaatactggcccagtaattacaacgcctgggggagctccaactaacaatctacttaaagcgaccctctatggactctcgcccgatatgcagccgttctttgcccggcagtgtgtcaaaggctgcaccgatgttttcgagctgtacccacaagttctcacagagatggcagtgcgtttgccttaccaaatacttaagctttcgtcgggtcatccgtcatcacacgattggtatcatctgctgtgtgaatacatgacaaacactctgtgcgagtatatgatgtacatgcagtcgcctgggttgcgtcgacaagttcgcaagcttctgttgtatatctgtggcaacaaggaaaaatatcgccagctacgtgatcttcactcgctggacactcacatgaaagccgttaaagattgttgcgacggcagtgccccgccgatttcatccattggatccagcacgagtgcaattctaagctacgatgcactcgttgaactgaccgaacacttccgagcttgtcaggaaattgcttcaattcgtaccggaaactggcagaaattctgcgttcgtaactccgatattctcccatctctgctgaacatcagctgctgccagttggaagaaggtgtttcttcaatcatcctgcaattgctgcaatcggccatctgtaacacccaaggagtcaaacaggattcgggatcggcatccgcaacgagcatgaaaatatcagtgctgaaagaacgcaaagatcgagacaaatccgaggaatccgacacagcaacggagtcgaaattcgatccggctcaatgcgtggctctagtgactcaaattttcaaccaagtaccgttccaaaacctgaccaaattcattcgaagcttcctcctggagacaaactcaactgccatacgttggcaagcccatagtttggtgtacgccttctatgaaaatagtagcgaagccaacaaggaaatgctcctgcaatgcctgtggggactttggccactgctaccggcgtatggaaaacgaacggctcaatttgtagatctattgggtttccttacgctcaacacaaaatcattgagcgacaagcttcccgactacacggctcaagcagtttctgttctgcggcagcaaaatgagttgctatcaaaacatccaaacgcccccatttacactgcccttgggcacgtcctggagttggaaggattttatctggagtctgaaccgtgcttggtatgcaacaatcccgaagtaccctactcaaacatcaaactttccacggtcaaggtggattccaagttcacaacaactacaaccatcgtaaaacttgttcaaagtcacacgatttcgaagatcatccttcgtattgctgacctgaaaagagcaaagatggtgcgcactatcaacatttactacaacaatcgaactgtgcaggccgtagtggaactcaaaaatcggccctcaatgtggcacaaggctcgtaaggtgactctccagtcgggacaaacggatgtcaagattgatttctcccttccgataacggcatgtaatttgatgatcgagtatgccgacttctacgaaaccgtcagcggatccagtgaaagccttcagtgtcctcgttgcagcgccgtggtagcagctaatccgggtgtttgcggtaactgtggcgagaatgtgttccagtgtcacaagtgtcgtgccatcaactacgacgaaaaggatccgttcctctgtcattcgtgtggtttttgcaagtatgccaaattcgattacagcatcttcggaagagcatgctgcgctgtggatccaatagaatcggctgaagatcgaaccaaaacggtgcaaaccatccatgcatcactggacaaggccgatcgttcgtacaaaacgttacagaacaataagcaaatattggaactgcttgtccagaaggtggctgagcataagctggatcgaacactggatgaaacgttgatcgggtcggttgttggttcgtcgcaggtgaataaagtgatccagttgctggcgcaaaagtactgcgtggagtccaagtcaacgtttgaagagctgagcaagatcattcaaaaagtgcaggcttgtagaagagaattagtggcgtatgatcgtagtcagatggacgcagcaagtggcggaccgatagctgctggatctccgtcggataaggccgttgcgctcaataaatgctacggttgcgccctggcatcgacggaacaatgcttgacgctgttgagagcaatggcatccaacatgccgtgccgtgtgggactctgcaatcagggtctggtgcaggagctagctctgaacaatttgcgtcgtggaacaaatcaaatccaggatgaagttcggcaattgctttgcctgttgactcgagacctaccggacgcgacctctgatttgtgtcagttgttgcaggatcgagtaaaaatggcgctcagcggaacagttccgttggctaacctggactcggccgtacgacacgaaatgggcctgctggaagcaatgacagcacaggacgattcatgttgggaactgaagctgcggacagtaattgaattgttcttgcaagcgtcaagggatgtccgtggacctgcagtagccgtaattcaaccatgtttgcgtatagtgcagtcgttgatgtgtccaccgttgccaatcagcaaaactaacaaagatttgacgacccaggatttatgtaccgtgcagccaaccgagggactcaccataagctacgagaagtggattaccggagatccgcagcattcattcgcggcatggaaagcccgcatgccaccaatcaccggtacagcgacaccacgtgccgaggacagttctatacagatgacactagcggcagattcagctgctggagaaacagacgctacgacaccaattagcagctatcgctcggtattggaacagaaacgcaaccgataccgtaaggcatatcttcatgaaaaatacggaaagcgttggcgtcaaaaagtgctcaacaaaggcgtgaatgcggttccgttggagctgacagcagcctggttgcaaccggttcttttcaataccaactctcgcctgggacgccagctagcttgtgctttggtaacatccctcagtagaactccggaacgcaaacgggagatactggatttgctcactagtttcctcaaaaacatcggcgaatgtggtgaagctagtgctgaattcatcgctctctatcgtattctagccgatgagactccatggcgtcagtatttggcgttaaagggagtcctctcgttgattgccgatttgttaactgtggaaatcgaaaaaatccatcgcctggaggagacaactctttcctcggatctggcacagggttacgctttgagacagttggtagaaatgatggcgatgttcttggacaacccgccaattagaaaagccttcaaaggcaaactgctaggatctgtcttacaaggttacttgaacttgcggaagctggtggtgcaaagaactcgcttgatcgacgatgctcaagaaaaattgctggaaatgctggaagaaatgaccaccggaacggaggaagaaactgcagcattcatggctgtttgcattgataccgttcggaagacacctacatcggacgtcaaaactcctgtgttcatgtttgaacgactttgctctattattcatcctgaagagaacgatgtgggagagttcttcttaacgctggagaaagatccccagcaggaagatttcttgcaagggaggatgttgggtaacccgtatccatcgaacgaagctggtttgggtccattgatgagagatgtcaagaacaagatttgcattgattgtgaactggtagctctgctggatgacgacaatggaatggaactgctggtgcacaacaagattatcagtttggatttgccggtgaaggaagtctacaagaaggtctggcttcaagaaggaggggaacgcgatgcaatgagaatcgtgtatcgcatgcgtggtcttctaggagatgcaaccgaagaattcatcgaaaccctgaatgccaagagccaagaagaagtggacaacgaacaactgtatcgcatggcaaatgttctggcagattgtgatggtctgaaagtgatgcttgatcgaattggcagcctacagaacgtatcgagatcaagaaccttgttgcaagtactgctaaaactgttcttgctaagcgtgaaagttcgtcgttgtcaagaggttctctgtcaaccggaactgggagcaattaacacccttttgaaagtgcttcaattgtgtttgcaaagcgaaaatgatgcccaacaatcggcagtgactgaacagctgttggaaatcatggaaaccattctttcaaaggcggcatccgacactctcgattcgttcttgcaattttcactcaccttcggaggacccgaatacgtacaagctctgttgtcatgtacaaactgcgcaaatgtacgcaacagcccgtcggttttgcggcacctcattcgagttttagcagccctcgtgtatggcaatgacatcaagatggctttgctatgtgaacacttcaaagaagttttcgatttcaacaagtttgacgccgaccgttctccggaagatgagtttaagatggaacttttctgcgttctgaccacaggcatcgaacataactcaatcggtggtattttgaaggattacatcatgagtctgggcatcgtggataaagctttggagtatatcaagagtcatgcaccgtgtgtcaaaccaactctactgaggaccgattcggacgaactaaaagaattcatctctcgggcatctctgaaatacattcttcgctttttgactgggctggctacgaaacatgaagctactcaacttgctgtggccaaggatataatcccaatcatccaccgtttggaacaggtttctagcgacgaacacgttgggtcgttggctgaaaacctactggaagctctttgcaccgaaccggtaacagcgaaacgtgtccaggaagttcgtgatttcacaagggctgagaagaaacgccttgctatggctacccgcgaaaaacaactagacgccctaggaatgcggacgaatgaaaagggtcaggtcaccgcgaagggatcaattctgtcacagatagaaaaactgcgtgaagaaactggtttggcgtgtttcatctgccgcgaaggctatgcttgtcaaccgaacaaagttttgggtatttacacatttaccaaacgagcaaatgtcgaggagttcgaaatgaagcagaagaaaacggttggatacaccacggttacgcatttcaacatagtgcacgtcgactgtcacatgtcggccattcgattggccagaagccgcgatgaatgggaaagtgcttcactgcagaatgccaacactcgctgcaatgggctactaccattgtggggtccagatgtcagcgaatcgtccttctcatcatccatggctcgtcacaacaattacatgcaggaatctactcagcgctgtgaaataaccttcagcagttctatccatgacttgaagcttttgttacttcgttttgcccaagaaaaaagcttccacgaagatgccggaggtggtggtccacaatccaacatgcaccttgttccttatttgctgttctacagtttgtacacgctgctttcatcgcgttcgtattcacgggaggagatgattctttccgcttacataacccataaaccgtcggatcgttggttggaatgcgcttacgagtcggaaggacctctctatttgataaccatgtcgctagctttgcacacccccggaatttggaatcgaaacaaattggctcatctgaaacgaatgatcagcatcggtcatgctcgtcacgttagtccaaacaccatctgtaagtttgtggcaccgaacgataaatcccagaaggactacgttgtctacaaaccgtacctgctgatgtggggtttggtagatttgatctacaaaaacttcttccgtacggtgactaccccgaaggatgaggattggccaatttcgttattcgattacattcgccgtaacgacgaagccatgttgaaacacgccgatggaaccctggaaacgttcacggaagagtacgtaccgtgcacctcgtttgcagagttttgcgatgtagctggtcttttgggtgacatcgaaaatcccgatgaatggatcgacgaactgttgcagtccttaccctcacccggaacgacatcaactgctgcaggatcgactacgaatacgggctcaggaagcactgcggctggtggtactacttcgaacgcttgagtttggtcgctttttgcaagcaacgacgaagatgacgattggtgatggtaatgtaattgccctcaacgtataattgttataacttttcaactatatccataatcgcattataataaattcaatacaattaaagcactgatagtagcgatgctaaatgaatcgtaataaaacaggcaccctgtgtctagcagcttaaaagcactgacgatatatcaaatataactcaataaataacccgcattgttgcaatatgtgtgattaatgaatttcaatacccattcaaataaattatccagcaattcaaa

SEQ ID NO: 812 - DNA, 3726 bp, Aedes aegypti
atggaggtggaaagcaacgtcatcaaggacgattcctcccgaggcagaatcagaggtgttgctggtcagcaccaccataaaggtggtaccaagagccaccatgcgagcaacgtcaacactggcaataccgtcacggtcaaagttggtctgaatatgaacatctgcagactgtgcctgacggagggtacggtcaattcacgattgcaaccggtttactacactaaggataccgcggacgagccactgctgcagaagattctggatctcaccacgatacaggtaacatacgcaacggattttccttcgtctatatgtattaactgcaaggcaaaactggaggagtacagtcacttccgccgacagtgcatagaaaatgatgaacttctacggatgaaatattacgaaatcaaagctgctgaagattaccaccttcaacaacagcagcagcagcagcagcaacagcaacaacagcagctacaccggaatcaaccaatcgaacacgaaatcgtagaggaagtcaaagcagaggaatacattgacgatacggacgatatcacgctggccatcgatgaatcggccgatgcagatgaagaatttcaagaagatagcgatgaacaacaccagcagcaacagggacaagtggttgaacaacaaacgatccagtacgtggcggctgatggcactatgaccgagtatgttgaatcgggcgatgttaggacagtttccagctcttcgcagcaacaacaaattcacatcagtggatacagcgaaggagagactatacaagctggcgaggcacacgaaatttactacactgatggcaacgacacctacgcaattcaaacgacggccgagggctacgtgaatgctgctaactatgttccccaggggtatgataatcaaactgaaatcgagtgcacgaccattgaacacctcccggaagaggaagtttatatggaagagggaggcgaagctggagttggaagcgctatcactccacggggagttcacgatcggccatttgtgtgcaaacactgcaaaactagcttcaaatacgagtacaactatgagagacacatgaagaatcatgcgaaagttctttacaggtgtggcaaatgctcaaaaacattcaccaagcagagaaagtgtcaacagcacttcctgaaggcccattcctctcagcggtacgagtgcgatatctgcttcaggacatacagtctaccaacacgtttggagaatcacgtcatcgaaatgcactcggaaaatggaatctacaaatgcgatcgatgtacagagaccttcacctcctatctagatttcaaatctcaccgcaacagccatcacagtattaacgggtccaacgccgcaactgtgattgcccagaccgtggaacaacaacgaccgcaaaccattcagcagattcaatctcctcagcctcacatagcgcctcatacgaccacgtccgtcagtacacgctcctcggtgtcggataactgcgatttcgaagttatgatcgatgaaaccaagatccccaaaccggcgaccggagccgattctggtgacgaaaaacgaccacttgtggtgaacgctagcagttccacccaggatcaggatatcattctgattgacgatgaagcagcgtccgccagtgcggcgaacaacaacaacatcaacaagccccctacagcaacggtagtagtctccacaagcaccaacagtgtcatcagtggggggaaaatagtgaccacaaccagtgctggtaccgttgtaaccagtgcactggccgcagtgcagccaatcgtcagtagtgtgcaacaaccgccgccagcgacgacggccacgacggtcattacgaatggtatcgataagaatagcatgcatcggcagttgctgcagcagatcgaggaaagtgaagccaactcgacggggcccaaaatctacaagtgtgacagctgtacgaagaatttcgtacacttgaacaacctgaaggcgcacatctacgcggaacatgacaacgacaaacctttcaagtgcaaactgtgccccatctcgttcaagacgaaggagatcctggtgatgcatatggtattacattctcagcacaacacggcaacttaagattgtgcggactgcgcttaagctgtgcatcaacaatccaagatgtttttaaaactaagaaatgcaaaccaacaatgttatttaaacaaatctcacaaggaaaattttctaacccttaaaaggaatttttctccttcctatctaaatatatgtagcaaatgaacaaaattaaaactattacaaacacccacacatgtaatacaaaaacccaatcgtaatacaatatattacagacgcatagaatgctttcaaatagaaacaaaaatcacaaggaaaaaacaaaacaggatagcgaactaaaattataacttctgtataaaaaggtgaaaataactattagtagttagtaagaaagtactagaaaaagtgacgatgatttccttgtttcagtttttttttcatagaaactttaatatatttttatttatgcgaaatttcatgttttctacgtttaagtttgtcctcgaataaaatcgaaaaaaaaaatcaaaaaacggctcgcttgcaatagtagttgctcataggattattttcgtaacgttagtattgttctcgtaaatagataagtgatcccttccctagaacgtaagtttaaaacttgcttcggatggtgctttctcctcctgagatcccttttatcatacacgattcatgaatcgctaatctcgctctcatgtaagtagtcctttttttaatgataaaacagaagattttcctatagttggaggtaagacgagtttgagttaagatggtgtgtgaaatgtaatcacaactgagttgttaattaaacgagggacacaattttgatttccttaaaggtatattgtagttttggagccaagtgtgaatgtgtataaaaatgtttggaatcggttcttccaaaataaaactaaaatacctatcgaaatgcttgattcaatgcgtgtaaagagagctaagtactttcttttaaattcgttagattgcaaacaaatgtgaatcaaaaaatcccttctgtaatgtgatcgatgtgatctggctatagtttaggaatgttaattttgtatatgattttaaatattgaatgcgacagttttccaagcagaacaaacaagttatttttaattaaaactacaagatcactagaaactgttctgttgcaatagctgtgagaaagagagtgtgagaataaactacgaattatatgtaagtgaagaccgtgcgaaagggagttgattttcgatatattttattgtcactgttaggtgaagagattggagtgtctgatgcgagtttcaaagtgagtaaaaaaatgcggatcttacttcgctaaaaagtagcgaaccgactacatttcgttacgttaatgttgctttttatttttcgccccattttttggatcatttcgtttatcatcatcgttgaatgcataaagaacaaaacattatttaggtagacttgcgcactgagtttgctagtgcttaggaaattattaaccgtcgagtgacgagggttaatttatgacacaaaaccagaatgaaactgattaaaataggaaaattgaaactaaattatgagaattctcgaagttcttgaatgtcgccatgaaatatgaatataaagtgttcc

SEQ ID NO: 813 - DNA, 5591 bp, Aedes aegypti
cccatgctatattcgaattatcatggtatgacgcgtgtgtaccgatctgtagacagctgctgttctgagcactgaagttagtccgcgaccgcgaaacgcgacagccacaataccgactctttttcagtattgtttgaaacggccaacaggtagcatcctccccttcaacgttcgcgacttcgatggcgtgcgatagtcgaagacaaggtttagcctcgcgatagcgtttcgatcgaaatttgtttttttttttttgcgcaacagcatcctcgcgtctaccggtagaaatctagccacaacgtgtctaacctaagcgtgacgtgaaacgacgtgattgtcgagatatttgtacacacagagttcaacacttgtggacatacctaatacagtttctcgagagcacagaggaatccagaaaatccagtatctgccggtggtgcctatatagtacatggacggcatgcaaagatgctaaaatcattccctagtggtgtatcaatttcataatcgcaatactgggtggcgtctacgcgcagaggaaacagactcgagattgaacctaaacggcacgtctacggtagtgagtttgcgtttgctctgaaccagttgttcgtgtttatggtagcatatcgattgaagaataacaggaaaagtgatttgtgctcaaaaataagttcgcatagtcggtgatcggtgaaaaagtgtatctttggggccggacgaaatccgccgtccaacagtgagaagaagataagatagcacacttttcttagtcagactgttttatttttcgacaaaattgattaaattcttgcgtataacttgtatgcatgcagtcagttatgttgtgttccttcgtaccgtcggtgtatttgcagaaattcggtgttaacgagcgtagttatttcgaaagctaatagagtgcatcattgtgaattgcatgtgacaacagtgtttgtaacgtttaaattgtaaattgaaccaataactaaacaactttaagttggaaaagtgcacatttctacatttttcatttaaaaggtgtatttctaatatgcgtagcagtgtgctgaaaatacccgtgatcgcgattgaaaataaataacaactgttaactcagtgtattcgaacatagaaaattgaaatctatgaaataatcgtaacaagacgctcaaaggtttgtgatattttcaaattgtaacaagcaaagataattaaaagcacccaactaatacaaacgaaaacgtagtcggacacggataaccaaacgtacgagtttcatttactactctgtcatcgatcactctgagaagggcgttgttgtagcctatcaaatgatgaacaggaaatcgctgaaaagtgcgcggaaggattttttcaaatcgatgtctgacttggctgacacagatggcagtaacacgaacacagccaatgggacgcccacgatcccgacagcgacggcgcgacgcatcggtcagggtttcttcagctccaatgcatcgtcttccggagcgggggcaggatcgacgacgaccacaggcacaatgctctccaatgcaagcatcagttcgtcacaggagctcctgaacgctaccagcagcatcaagagttccaagacgtcttcgtcgacgagcaacagtacaaccaaatcgtccagcagaatggcttgtgaaacttctgccacacagcgatcgacgtcctcctcttcaaagtccgcctctctctcggcgacaacctcttccacagaagcaatcaagcatgatctcggcgatatgaagaattctatggcagagcttggaaacgtgttggccaataccaggggctcatcccagatcaccacatcttcatcatcgacgtcaacgtcttccaaaatgacatcgtccgaatcttcatcatcgagctacatgaaaaagctttccatgggcaatagttcatccaacttgttggaacaccaaaagagattacgagcgtcgatggatagtttggacgagcccatgacagagtatcacgtgacccatccggactccgatggggaattgaacaacatgatagtgaagaagcccgatggtacgatgcaaaacgggcacctggccatgaatgggacggtagacacggtgaagttcgagcagaagaaaaccacttccgaatcgaaaacgaaggtggtgaaggacgggttcagcagcgagcaggcaacgttgaattcggcacagatgaaaaaactgcacgctggggacgtccagtaccaggaggaggcagccttggctgcaatgagcaaccaggtggaggttgatggactgaaacacgaggagaaagctgccatgttgaaggaagcacggtccctgaagatgggcgattttcagcaagccgaagcgaataatattgcggcgcacagtgtcaaagtgtcgggcgatcatttcagctccgaaaaaaaagcaattgctcaggcacaacaaagacagacggtaacatcgtctggactgttcaaccaggaaaaacacgtatctgcggctacgcaatccaactactcgtcgcgcagtacggtcacttctacctcacagatgacctcccattcgtcgaccatgaacggaactatcaacggagactttcccaactttgaagatctcgaatgtctcgccaacaatccgatgaacattgaaagtgtaatcaacaagtattcgaatcatttgacggattatgttaagaacctgcagcagcaagaaaagatgccgatggcgccaagcctattgaacgaaatgaatgaaatcatacaacgagcctgggctgttccaactcatggccatgagctgggagcaagcctgtgcgatacattacgaaacaccggagggttggatttgctcatgaagaactgcataaataatgacagcgctgtccaattttcatcggccaaacttttggagcagtgtcttaccacagaaaatcgttcacacgtggttaaaaacggtctcgagaaggtggtaaatgtggcatgcttttgtactaagaacagtgggacagaccattcacgggttggaaccggaatcctgcagcatctattcaagcacagtgaagacacgtgctctaatgtgattcgattgggaggtctcgatgctgtcctgtttgaatgtaggaaaaacgacgtggaaaccttaagacactgcgcgggagccttagccaatctatcactctatggtggagcagagaaccaagaggctatgatcaacaggaaagtaccctcttggttattcccactggctttccatcacgacgaaaatattaaatactacgcttgtctcgctattgtggtactggtagcaaataaagaaattgaagctgaagttatcaaatctggtaccttgaaccttgttgaaccatttgttacgtctcacaacccgtcggagtttgccaagtctaatttggcccacgcacacggccaaagcaagcactggttacagaagttggttcctgtgcttagttcaaagcgcgaagaagcccgaaacctagcagcattccatttctgcatggaggccggaatcaaaaaggagcaaggcaacacaaatattttcaaagaaatcggtgcgattgagccgcttatacgagttgcaagctcaccgaacgcaattgcttcaaagtttgccgcgcaagcgctgcggctaatcggcgaagaagtgccacacaaactgtcccaacaggtgcctctgtggtccactgaggacgtacgagaatgggttaaacaaatcgggttcaacgagtacgaacacaactttttcgactccaaggtcgatggagatctcttactgcaattaacagaggacaatcttcgagaagacataggcatgaccaatggaatcaggcgcaaacggttcgaacgcgaactgcaaaatcttaagagaatggcagactacagctcaagagattctgataatctacattcatttttgtacaaaattgcgcccgagtatacaatctacacatattccatgctgaatgcaggcgttgacattgaatccattaaaattttggatgacgacttgctgttatgtgcctgcggaatcaccaactccattcacagatcacgaattttgaacgccatcaaaaacagcgagatctcaacgttgtcgatggaaaagagcgccgaaaagaatttggacgtgttcgtcagctatcgacgcagtaacggctctcagctggctagtttgctgaaggtccatctggaactgaggggtttctcggtgttcatcgacgtagaacggctcgaagctggaaagttcgataacaatctgctacaaagtattcgccacgcaaaacacttcctgttggtactgacgcaagatgccctagaacggtgcgtggatgataccgatggaaaagattgggtgcacagggaaatcgtagcagcactcaattccgactgcaacatcatcccaatcatcgacaatttccagtggccggagccagaacgcttaccagaggatatgcgtggggtgtgccacttcaatggcgttagatggattcatgactaccaggatgcatgcgtggacaaactggaaaggttcatgcgtgccgaaaccaacactcgttgcagttcaacggatcacttccgtaacctgctgaaccgaccaggcggcgattcaacgccaacaacaccaactatttatcagcgaatgcacagcaacgattctgtgggttctactggccactcgcagtcccaacaaccgagtagtggatcgaattcctcactgaaccaaccgcgctattactccagcttggcaaatcgttatcgtaagtcttcaagtccagctcgtcagttactgagtggcacaggaagctacgcaacgactgggcgaacttcacgcttcccaagctctaagatatcatctctaggaggtggcatggcgaggaatatccgtgcttcggaaatgcggaggagttctgcggctggattgaatgctactgcacagcgccctcctcttccgcctaaaattgaaaaccgctgccatagctatgagggactgctacgagaggacagaaaaccttctgaaggacaagatcatacggatgcaaaaattccggataccacttcgacggattctgcggctgaaccggtcaaatcaaccgaggaatccataaaaaccaaaaatcgtagatctcgcagcatggatgatttatttgacgacgatcgaaatcttacggattttctcgacaacacccaaagcatggaaaaccttgcatctgaagacaactccattgaaccacaatctccattaaaagttatgggaaacatttgcttcaaccctcgatttgttgaaaccgtcgcggagcctgcagaaactccagatcctcgaatggacacagcatctcctgaatcatgcggcgaacaaccctgtgaaaacgaaactatcactgtagatagcactccacgtagcaagcatgacatcgcagacaaagctccacctgaagatgacgtactatcgacgaactcttcgttgaattcgtttgcttcgacaagcgacacaacttcggtgaataaaaaatccaatacaccgttcatcaataagtatgtcaaaaaagtgaagtcgctgatgaagaaatag

SEQ ID NO: 814 - DNA, 3163 bp, Aedes aegypti
atggccaccataagacaggcgatcaacgatacgatagaacgagtgcgcatcccgacgccaacccgcctgcgtgacctcatccgacagatccgcgccgcccgaacagcagccgaagaacgggccgtggtcaatcgagagtgcgcctacatccgcggaacattccgagaggaggactcggtgtggcgatgtcggaacattgccaaacttctgtacattcacatgctcggctatccggcgcactttggccagctcgagtgcctcaaactgaccgccagtccccggttcacagacaaacggatcggctatctgggggcgatgctactgctggacgaacggcaagacgttcacctgctgatcaccaactgcttaaagaatgacctcaacagtacgacccagtttgtggtgggtctggcgctgtgtaccctgggagccatcgcgtcgccggagatggcccgtgatttggccggtgaggtggaaaagctgatgcgctcgcccaatgcgtacattcggaaaaaagctgccctctgtgcatttcggatcatcaaaagggtcccggagctgatggagatattcctgccggcgacccgatcactgctgaacgagaagaatcatggtatcctaatcgccggcgtcaccctcatcacggaaatgtgcgagaagagccaggacacgttgaatcacttcaaaaagattgtccccaatctggtgcggatccttaaaaatctaatcctcgctggttactcaccggagcacgacgtgagtggggtgagcgatccattcctgcaggtgaaaatcctccgattactgagaatactgggccacaacgacccggatgcttcggaggcgatgaacgacatcctcgcacaggtcgccaccaacaccgagacgagtaaaaacgttggcaacacaatcctgtacgaaacggtgctgtccattatggatatcaaatccgaaggtggcctccgagtgctggcagtcaacattctcggtcgattcctgctgaacagcgacaagaacatccgctacgtggccctcaatacgcttctgcggacggttcatgccgatatcagtgccgtccagcggcatcgtagcaccattttggaatgcctcaaggatccggacgtttcgattcgacggcgggcgatggagctctcgtttgccctgatcaactcacagaacatccgggccatgtccaaggagctgttgatcttcctggagaaggcggacgccgagttcaaggcgcagtgcagcagtcggatggtgcacgtggccgagcggtacgctacgtcgattcgctggcgattggatacactgctgagtgtgctcattgcggagcacgcgaaaactctaacagccttagataagaacggtctacttgtacagttagtggcgaagaatagcggtggttgtctgcagatcgtcatgacagctgtaaataactcgttaaccacactagaacaataccttttccaggctgccgttccccgaagctttacgttacaaatgctatcgccgtcaggttccactcttgcaccgggaggaaccatcactcaggagatgcgagtaaccagcactgcaaaggccaccctccgaatgcgactgcggatatcctaccagtgcgatggcaatcccatcctggagcagaccgaagtgtccggattccccgaggaacccacaccgctcgaatgaggtccgaactggaacgtaaacataacagttaagttttagtttgctcgtcggcctgccgttttgacggcttgggagccgaatttcagttcaggtttcttcttccgtcttcaaactgtggtgagtttattgtgtatggacaagagttttggttttaagtgatctagggacaatttttaacaaaggctaatcgaacccattgtgacagaaaagaagcagaaaatcgtcagtccttccgaaatctactctacttagccgggtaaccattagggtcgttttatttgctgccacatggggcacttctcaacacagaaactagttaactaacccccctaaatcgctatgaattatattaaaattaataatctatatataaaaaaagaaagtaaaacaaaaacactactagtgagatagataatatattcataagaaatagcgtgtggcatgactgcgaattagaggtgagcttctgctagagtgattggacttagaatgagtaaagttgtaaataattcgtaatgaaaactgaaggagaaaagcgatattaatattagtacaccttagaaccggaacgtgcaagcaagaaaccccatgtttttgaaacaactagttactcgggaaaataagaagaaaaagaagaacgttggctcaaacagaggactctgtctctatgctcgatgacatatttttgattcttgtgtagtctttcggttttccacacgaattcgctttcatagtgtaatttctccagactagcaaagcgataaaatactagaagcaagtgtactgttttccgtccaaatacacccaattcgatgcatgatgaatgtgcgtgtgaaaagaaaaaaaaaaaacgatggcgtgagattcggagaatttccggcttttcttccttgactcgcaacaaggtcgagaaaatcaaacttatgtgtatggcaatgctctaaagggcaaaagtttcgctttctaaaatcagacttttaaaacattcttactgctaagtttcgactagtgtctctccgtgttcgaattctgagatgatgacaatatctactacttatctaaacctatcttaaacagttgttttacatccgataaatcgggacgtttcaatttgtttgactcagtccgttattacgcttcacagatacgaagaacgaacacagtatttttgtaccatgaggaaaattagcgatgtgaagtcgaagttataaggaaaaaaaatggaagaaaagcgataaaacatgttattcacaatgatgtttagagaaacacagacaactactaaattgatatgaatgaaatgtagggattagaggtgtgtgaaagtaacctacatagaatgaacctactaaatgcagaatgctgcatcaccaaactagagtggtgtacgctttagaatgagtgattatgtctaggtgataaccgagaaagaagcagttaagacagctataaatatatgtataatacacgatcc

SEQ ID NO: 815 - DNA, 1212 bp, Aedes aegypti
atgctagaggctgccaaacagcaggactttgatagcgtcaagacgaacaacaatagcaacagcagcagcaatcatgacgagtcgcatcatcgtcatcatcaaggtcagtcagcgtcatcatcagcagaaacagtttctccgtcagcaaatccatcgtcgcccgtaaaagtggaagtgctggaggaaggaagcaccaaaagcagcagttacgatttggcacacttcgaaccagtgcgtattctcagcaacaacagcacccacaagtcggtttcgctgttgggacacttcgcgaatctatcgcgggacgatttctccatcattgtgttggaaaagacggccttcaccgaggctcagctgcgaaatacgacgtcgagtgaaagtgaatcgaaacattcatccaccacgactgcagaagctgacactgaagctgagcgcagtatcttctcgaccaaatctcacctgcgcacggaattcatcaacgatatctacgggaatttcctgtgcgtaaccgacccggaagtgaaccaactgaaggtgacgatcgtctacccagcgacggagaagcatatttcgaaatattccgcacacgcccggtacctggtcgaggagacggcggacgactatcagagcgtgacgttgccccacttggagcaggaacagctgagcttggagtggttgtacaacatcctcgagcatcgcaaggaaaaggaccgtatcgtttacgaggacccatcggataaggttggcttcatcctgttgccggacttgaaatgggacggtaaaaccctcgaacagctgtacctcctcgccttggttcgcccaaagggcatcaaatcgctgcgcgatcttacagcggcccatttgccactgctgcgaaacatcaaagaaggtggcaccaaagccatcaaggagcgatacggaatcgactccgaccacttgagggtctatctgcactatcaaccctcgttctaccatctgcacgtgcatttcacgtacctgaaacacgatcctccgggaattcattgcgagaagagccacctactgacgacgatcattgaaaacctggaactcgtgccggactattaccagagagttaccctttcgtgtgtgctcggcgaaaacgataaattgtacgctaaactgaaggcagctaaggaagttaaccaagacgcagaagatcaacccaaagccaaacgtactaaaatcgaataa

SEQ ID NO: 816 - DNA, 1112 bp, Aedes aegypti
ccgacaatgcgttcggcagcgtcgttaataactgctttgactgaccttcaggtccccgttttacggtaccaacagatttattaaatttatcataataataaatataaatctattggacgcttcagtcaaatttgtaaacaggatataaaattttaacaattatatatttttatgaatatttcgacaacatattgtttcagttttttgtagtggctatctgaatattgttacggttttgttgtggtgagaacgttataatgttactaaacatgtaaaccaagtgtttatgatcaagcagcagttgaaagaggattgagctacatctaatccattgaatttccattttcaggtaatatctaattttgatcaacatgacgcaaatgagtcaagaagaaatagtctcgaacactaaaacggttcttcaagggctggaagccttaagggttgaacacttaaccctcatttccaaccttactgaaggcagcaaaaaagacccagataagtcggaaattgttatgaaaaatattgaaaacatcgaattgggcttaggagaagcacaggtgattgtcgtgcttgcatctcatctacaaaatatcgaggccgaaaagcaaaagttacgtacacaggtgcgacgattatgtcaggaaaatgcctggctgcgagatgaactagcaaacacacaacagaagctccaatcgtcagagcagacggttgcccagcttgaggaagaaaagaaacatctggagttcatggcatccgtgaagaaatatgacgataaccaagaaaatgaagagcaacaggaaaaatcacgctcggacccagtggtggaactcttcccggaagatgagtccgaggagagacataccatgtccccaacaccaccaaatcagtttgcaaaccacgccaatgcaggctatgagatcccagcgcgcttgaggacattgcacaatctggttatccagtacgcgtctcaaggtcgttacgaggtagcggtcccactttgcaaacaagctctggaggatttggagagaaccagcggtcacgatcatccggacgtcgcaactatgttgaacatcctggctttagtatacagagatcaggtttgtgtatag

SEQ ID NO: 817 - DNA, 2137 bp, Aedes aegypti
gggctcacattttttacgactcccaattttccgccagcttgaccgacaatcaatcatgtggagaactgcagtcctgtttattgccattttcgggtgcaatgtgtgcgcttcattttatggatttccgttgatcacgaagcccaaagagatatgggataccctaactaacaatttcactgttaacgatttcactgtactgagatatcaaccacagcaagagcaggggttggaaatctttcctggagaggaatgtgatagaacgtgcagtgtggatgaaccttctagaatatgttactacaagtgggtgctggaaagctacgccgccatgggatctgcatgttgggactgcattcggggaaatcgcacgcactgcttccatccacagtgtgtcaccgccaacggaatggaacgtagtattgtttccatcaatcgaaagatgcccggacctttgatatttgtctgccaaggggataccattgtggtcgatgtatcaaacgaaatggagggcatgtcagccactattcattggcacggctttcgccagatgcaatcgccctggatggacggagtgccaatggtgacgcagtgtccgatagctcccagcaccacctttcgatacaggttcgtagcggaagaagcaggaacgcactggtaccattcccactcggggtaccacatggcaaacggacatctcggagccgccgttgtgagaaacccattggacgtaaatatggctttatatgactttgatctgtcggaacatgtgatgttgatatcggactggacattggattcggctgaacggtgggttcccggacagcagagctctcaaatggcggtggactcaattctaataaatggacgagggcggtataccaaggaagaaacgggaaccaaggtagactatacgccattaacggtgttccgcgtacgacgtaattatcgttatcgattccgattaattagcggtggcagtcaatattgtccttttcaattgcagattgaaaaccatcgaatgctagtcatttccacggatggcggtgctgttaagccacacatggtggatacattaatttccatatccggagagaggtatgattttgttattaatgcggaccaacccgtaggtaactactgggtaagagttcgtggcgctggtttttgcagcacattaagtgtagaaacatttgcaattctttcctatgctgatccgtctatttctaccgaaagcctcatgtatcccactcttgagccacccgagtacggcaatgcgtacccgatgggacaaaccctaaacgagcaaactgccacttgctacaattcggaagatcagtttacgtgtgccgcagatttggagacacatgaagcccaccgggatgacaaactgataaatgctacaccggatgtccgtttattcctcggattcaaaatgatgcatcccgataaccgatggctcttctcggagtacaaacctttcattaccgtacgcgaggacttcaacaccattgcagcagccaataacatcagtttcagatatcctagttttcctctactgatacaaccggatctcattatagacgaaaacaaacagttctgcaatagtactcatcttcctccaggatgtgataggttacatctatgcttttgtacgcaccggattaaagtcaaactgaatgacattgtggagctgactttgtatgatacagcttatgaacgtcaaaacttctatcatcccttccatatccacggtcatcggttcatcattaccgatatgggaaggctaccggagagcgccatcaactcgcggctcaagtaccttcaaggacgaaacttcacccaaagacccaacggtcataacccaccctttaaggatacgatatccataccgaatgagggctttgtgaagacgcgctttagagcaagcaatccaggtttttggtttgtacattgccactttgaatggcatcttggaactggcatgggtctagtgctgcaggtcggagaagtatatcaaatgttgaaagcacctcctggattccctcgttgtgatgactacaaaccagagctacgcgggacgtaatgatgcattcatgaacaggaacgggttgtattttttttttaattacaaagatgactg

SEQ ID NO: 818 - DNA, 3568 bp, Aedes aegypti
atgttctctctagctatccagatcaaagccctgccagagcagagtatcaaacggattcgtatgacggctggaattcagctcaccaccctgcgtcatcactctactcttccacagcattcgtggctaacgcagctgatcgatatgttcgacgttgtggactacccggtccagggctactcgccgctgggagttatcactgaaatgcatttgcatctgtgggattgtgcgatagattaccggccgctgtatttcccatatcgagcagtaatcactattggatcattcatgatcagcagcaatataacgacagaaagctctgggttgactttgaggttcattgcagaggatgcagcgatgtgtttggcgcctcaagacaacaagattactgttttgccttccagtgagcttgtttgcttggttgaggttggattgtttgagatttcgctccggttgaatgaaaaagccaccggttctttccccaaatttgatctaagagctgccatgaatgatgttcatgtgaggacatgtgcagattctggaagggcacttgcgcaactgattggatacctagcggcagaaggtgatctgttaccgcaggatgatggagccagtgatgttgaggataatgagagtgtgtgcggtttaccgatgggtaacgaacaagaagcagatttggttccggtgaagcctccccaagcgccagaagtcacacccaagcagcagcaacgagtgaactctttgatggccgaagcgatggaggaaagcatgtcacttcaaagtaacaatagtgacctctcacgagatgatcagttgttggcggacggggaaggtgttgaagtatttttcttcccagatgaagatcagacacgggctgctgctcagaagaagttggctaacaatctaatttccgataacagtaataaactaagttccgatacggatgacgacttctgtttcattgcagacgaagaaaagcctcattgcggtaatcaggaagtgccagtgctggaagaccctatccgcataatagacaatcatttcagtgttcccagtggtaaacctgatctgctgttggcaccgaaagggtttcccatggctgttactcgatacaccatttgcgagatgacggtcacttggcatctatatggaggacacgatttcaccaccgaggaagataaaaagaaaccaaaaccaaaaaactactccaaaggatcaccctcggtaaccttcggaccgattccggctcagaagcttacgtggaaaagtcgcggtggtcccgaacggagacacgacgtaatgatggaaatccagataagcaaggtaaagttctcgcatgaggtgtatccgccgaacacggagcaggcctcccggcaagtacttctcataacggaccttgaaatactcgaccgcctagcaatatcggacatcaaaaagttcctctatcaaacaagcctccatcggcccaacaaaggcaataaccacatgattgtcatcaaagctcttcaccttcggccaaatcccattctgcaagcgcaagagtgctgcctaaggatctccattttacctattcggctgaacatcgatcaggattctctcctcttcatggtaaacttctttaaccaacttggcggtggagacgatttgaacgatccggcaatgcagtatcaacacacgtcagccaatcgtaggtccagtcaaacaacgccctcccatcaacccccggtgatgatggtcgagctaccagaggcggcccaagaactacaagctcgcaaaatggtatcggaaaatctaatgctactaatcgaggaagaagaaaagaacaaggaacagcaggaaacgaccagtgaaatgggcgacgaggcacctccaatctatttccggaacgtcatcttcggtccagatgttcccattcgcatcgactaccatggcaaacgggtggaactgtcgcgtggaccattggccggcctgttgatgggacttggacagttgcagtgttctgagattcgcctgaagaaaatatcctatcggcacggattgttgggcgttgatcgactgatttcgttcctcctgcaagagtggctgcaggacatcaagaagaagcagctaccgaagattcttggaggcgttggaccgatgtattcgcttgtccaactattccaaggcatttgggacctgttctggttgccaatcgagcagtatcaaaaggatggtcgcatcgtgcgaggcctgcaaaggggtgctcagagcttcaccgcccggacagcgctagccgctctggaaatcaccactaggattattcatcttcttcagattacggctgaaactgcgtacgatatggtttctccgggaccgtcggtgcgtcggggtcgtggcaataaaaagggaaaacggaaacgactgcacccgccacaagacatccgcgaagggatgtccaatgccatacagattgtccgagagggtatcagcgaaactgcccacaacttggtcgagctcactgccctggaacacgaccaaaagggttacaccggtgccgtaggagcggtaatgcgacaaatcccacccatcgtagtgcagccgatcgtactggccacgcaagccaccagcaacgtgctcggtggagtcaaaaaccaactagtgccagacgcccgcgcagaagcccgcgaaaagtacaaggacgatgtggaataggtgcgcctctttgtccagatgttctattttatagaaaattgacactaattttagatttttttttgtgattttatcggacctacgctgttctagaacgataggttccatgtttatgattttgttttttcaaacatataattttaagttgatttagttgaagtcgatttaggatctacttacccggtttttagtgaaacgaagaaaataatgtgataaacagttaaataaacaatatactatagcagctaaattgtgtatcgaaaggaatacgcaatctgtaacgtaagtcgcatggagttcaatactaactttttcggaagcaggttttcgacagaatgagatagtttgtcatccaaaaataaaattagcaccaactaactagtaattcgatatgatagatgataaatctctctacaagcttatatttcaatttgataaactttcaatctgataatacttctgagaagagttccatctcttgtcttctaggttattgtattgcgaactaataagagttatcaatatttctacacaatttagatcttactatatatatcctctcagaatcaaaaactaatctgatcgaatcggtaatgatagaaattgacaagttttcccgagagtgcaggaatggttgttatgtctcttctgtcagtcatttattgaagaacataattttgagaatgaatgaaaccacgtgctagacataatttaactagagagcaatgattgtgagtgaacgtagttaaccgaaaggattcgtctaacttaaaacctatattcgataataagtacatttagtatgcatcgatagagttgaggaattattgacgaaaaataaatacaccgccgaagcctaaagacttgacgagttctacaa

SEQ ID NO: 819 - DNA, 864 bp, Aedes aegypti
atggaggacgaaacgatattcggagaaaagcaatcgatacgggactcggcccgggccctgaagaaatatggcagcatttccggtggtggaagtgggagtggcggaagcggaggcagctgtcgatcgccggccctcacctcggaggcactgatacggcacgatgtggacaaaaccgacacgctgcaggggatcgcgctcaagtatggatgtagtatggaacaaatccgtcgtatcaaccgactcctaccgacggacaccatctttcttcgaccattcctgatgataccggtcgacaaggactccccgtactatccaaaagatccatcagccatcatccggcccagttcgctgtcggttcggtcgaccacgatcgccggatgtccggccggttcgtcggcctgttccaccccgatagatccgggcataagcgaggaaagcgccatttcccccgaggaggaaagccgcaaaaacatggaagagttcctagggaagatagattcgtcgatcgcaacgacacgaaagtacattgccgagtcgcaacggaatagcgagttcatttccagccagagcgacgataatatttttagttccggtgctagtatgaacagtagtggctactactcgaaaccgagggcgtactcgacggcatcctcctcttcgtccatctcttcatatcaacagtatcatttccacacgccctcggggactggcggaggggccagttcatcccatcacaaacgacaaagctcctcggggagtgcagcttcagacacgagtcaactgatcgtaatgacccaaggcaaacgggtgcagagttccctccaaaagctggaaaagcaacaggacgagctgttcgaattgtag

SEQ ID NO: 820 - DNA, 727 bp, Aedes aegypti
atgacgagcggaatttcggcaattttctggcgattcttccactggggtccgctgacggcgataagcatcatcaaatcgatcacctttatggccctgtacctgaacgccatgtggtggccaccgaaccgcaccttcggagggttccttaaccaaaccgtcttcctgatgctgtccgccagcaccgggttcaactttgtgatggcctcgctgacggggcccaagttcctgccgctgcggtggcgcccgaagaatcccgaagatgaacagttcctacagtactgcggcacctgcgagggcttcaaagcgcctcgatcgcatcactgtcggaaatgcgatcgctgtgtgatcaagatggatcatcactgtccgtggatcaaccactgcgtcggatggggcaaccacgcgtactttacgtgcttcctggcgtttgccgtggccggatgtatccacgccacggtgatcctgtgcggagcgctgtacgccggattgcaccgggattggtacgtgtactacgggcagtactcgaaggcaacggtgtacttgagtctatggagtttagtcctaggggtgttcaacgtgggattggcgattggtgtgatcatcgcagttgggatgctgttgttcttccaagtgcgggccatcgtgaacaatcgtaccgggatcgaggactggattctggagaagcgagacatctacgggagggtacggaagataactttcagtatcc

SEQ ID NO: 821 - DNA, 2397 bp, Aedes aegypti
atgggaaaaaggtggcagctgaagacgattttggcggtggctttgctgcaatgctgcgcggtgcagagtttctacgttcccggagtggccccggtcgagttccggaagggccagaagattgacgtcaaggcggtcaagatgaccagcactcacactcagctaccgtacgagtattactcgttgcagttttgcttgccgaagaatggaaccctggtgtacaaaagtgagaatctcggtgaggtcctgcggggagatcggatcgtcaatacgccgtacgaggtccggatggcggaagatgtgcggtgtaagctgttgtgcaatagcagggataggccgctgaactgggaccgagagcagtcggagaaggtggccgaacggattcgacacgagtactttgtgcatttgatcgtagataacttgccagtagctaccaaatttgtgaatccggacacaaacgagcagcagtttgaacacggataccgtctgggtcttatggacggcaataacgtgtacattaacaatcatctgaagttccgattgttttatcatatgcacagcgagaatcaatatcgagtggtcggtttcgaggtggaaaccctttcgattcacaaggatcaactcagcttcgaaggcgatacgtgcagtttcccggagagtccccgaccacagcccgtttcggtgcatgctggccatacgcagctgttcttcacttactcggtcgagtggaaggaatcatcggtgaaatgggcctcccgatgggatatctatctcggcatgaacgatgtgcagatccattggttcagcattatcaactcgttggtggtggtgttcttcctctccggtattcttacaatgattatggtgcgaacactccgacgagacatcgctaaatataacacagacgacagcgtcaacatcgaggatacgctggaggaaaccggttggaagttggtacatggggatgttttccgccctcctcggcatccaagactgtttgccgccgtcattggtagcggaatccagattttcttcatggctatgatcacgatcattatcgccatgctgggaatgctgtctccatcgtcgcgaggtgccctgatgacggctggaatcatgctgtacgtgttcatgggtttgatcgctggctatttctccgcccgattgtacaaaaccatgaagggacgaaattgggagcgagcagccttcctgacggcgactttgttccccggactcgtgttcggcacttgcttcattttaaacttcttcatctgggatcgcaattcgagtggtgccgttccgttcggcacaatggtggcacttttgtgtttatggtttggaatctcattgcccctggtgtacctaggatattactttggatttagaaagcaagcctaccagcatccggttcgaaccaatatgattcctcggcagattccgcaccagcactggtacatgaatctgggactctgcgtgctgatggccggtattctgccattcggggccgttttcatcgaattgttcttcatcttttcggccatctggcagaaccagttttactacctcttcggttttctgttccttgtgttctgcatattggtggtaagctgtggccaaatttcgatagtaatgacgtacttccagttgtgcgctgaggactatcgctggtggtggcgaagtttcatcgtgtcaggcggctcagctgtgtacattcttttctacagcatattctacttcttcaccaaactcgagattacggaattcattccaacgttgctgtatctagggtacaccggtctgatggtgatcacattctacatcctaacgggaacaatcggattcttcgctgcgtacagctttatccgtaagatttatggcgccgtgaagattgactaaatggttgctgccagcggggcacccttgagctattaacattaacgatcgataatcgatgtgcgtgagtgtgtgcattacgaatgtgtgataaaaaaaaataattgattttaagactgtccgaaccgagcgactgagagcgagcgtctttatgttaagggaatgagtgcaactgcgattagttttgttctttttaaattgagcgatcattttcccactgaatcattttaatcctttcgccaaatcactgcttctcgatgatgtaaccgagcaaaaattgaatgtcgtacctaaactataactaagcaacagagtgcagaatcgctcggtgatcaacaagtgactttaagttttagatgtggttgttctagcgagatccaatgacaaagcagcagacagcgtcggaaagaatgcaatcactagagggcaggaattgcattcagttcatgtgtaagaacgtctcaactacaaaagtgaaaaaaacattggatataaattcttaaatct

SEQ ID NO: 822 - DNA, 3095 bp, Aedes aegypti; identical to SEQ ID NO: 441

SEQ ID NO: 823 - DNA, 1784 bp, Aedes aegypti
caatcatgaagatggctgacggttctacgatccttcgaagaaacagacccggaaccaaagctaaggacttctcaaactggcccgatgaaccgttcgaagagatggacagcactcttgcagtgcagcagtacattcagcagatgatcaagaaggatccatccaatgtggagcaaatcttgacgatgcccgacgggcaagacgagggcgtatggaagtatgaacatctcagacaattctgcatggaattgaacggtttggcggtgcggctacagacgcagtgttttcccgccacctgcaaccagatgacggcgaccgagcagtggatcttcctgtgcgcggcgcacaaaacgccaaaagaatgtccggcgattgactacactcgtcacacgctggatggggccgcttgccttctcaatagcaataaatatttccccagcagggtctcaatcaaggaatcatcagtgtccaagctcggctccgtgtgccggcgtgtttatcgaattttctcgcatgcgtactaccaccatcggcgaatatttaatgagttcgaggaggaaacgtatctgtgtttgcggtttactcacttcgtcacaaagtactctctgatgtcgaaagaaaatctgatcgttccgattccggaaggagaattgacgcccggcgaaagcgaggcttaataaattgaaactttttacccctaaacctctactgctgtaatgccctttctggactattaatggtgatctaggacagagcgttttatttgtgtaaaggattgattttctttatatttttgttccaaatatgcaaaaacaacaaccatgttgaatctaagttaatttgttcattgtccttcgaaatgcttaataaaagcttatatttgaactttcatttctgtgttgtaacatttgaacgtgtcagcaccaagattttcctatttcgatacatcttatacaggacaacagagcatgacatggaagtttataatcaaaggaaaacatatttatactatttcaattatttaataaccagggggaaacacaagttaatgagaatatgaatatattggatcagcgtcattcgaaatctgtataatctactcgacaaaaaaaacgtgtaaaattaaaagtatttaacgattgaacagtagtgtaatttatataaaaagtatgtagactacaaatataaaaaaataaaacaaacaataactatctcttaagacgtcgcaccgatcttcaaaaggctgaaggaaatattgaaatgtaaaccagaaaacaatgcgctagaccgtgaacaacaaccatccgtcttcggggtcttgtgtatttcatctatctaatgcatgcgcaccctgtttgttacatctacctattttctaaaacacccagttaatgaatgttgtggggcgaaaaaatgtatgatttctttgaaaaagaaaaaaatgagggaagaactaagccgcagtgttaaaacaataagttcgtaggaattttggtagaagcaaaacaatgtacgtgtcagttttttaagctaattgaagttataaaaaatccaaaaaagggaagcattaatacacgacaatttataagattcgcaacagaaaagagaatacacagtgtttagtaactattatcagctaactatatcagtagcgattgaaagaagacaaatgttgaaggaaatcaccggaggtaaaagatgtttacacctgaaaggagagattatgtaattaagccttggaaaggaaagtcaaataaaatcattagtaatatgatcatttaatcgtt

SEQ ID NO: 824 - DNA, 1631 bp, Aedes aegypti
tccactctctccgtgaacgtctcgtaaaatggcttatacctgcggagtaattacggtaattccaagtttgaagaacccctcggcaatcgcaaacaaaagtgcattgaatgacagctgcaaatgcataccagaatcaaaacatcgtgcgttatcagtattttccgaattttctcacaaaacgtggagcatcaaaattggccaagcgcaggcatcgtttcggcacagaagcaccagcgccagcaagcttcgacgacgaaagccgacaacaaacatggccattgggcggtaccaacatctgcacaagcggaactgcatcggaatgttgccgttgttttgttccttcttggccggcgtgtgcctgaccgtattgatcggtggaacgcgacaaacgtgcgaatcggtgggtagaatatatgagccggaaaattcgtactttttgatgctgctgatagtgagtgccccggggaatgtcgagaggcggaacgccatacgggagacatatctgaatttgcggccacggatgttgaacgaaagctaccaagaggaggcgatctacgttccgctgtacgacggtgatacggggcagctgcagctggagagtgtccagaagcaacgggaattgttgaatgggtatcgccggtggcaggagaagaagatcaaaaatataaaggtcatcaatttcaaagtgaagacgttgtttgctatcggaacgtacggtctgtcgaggagtgagaggaagactatctacgaagaacagcgggtgtacaatgacgttctggaactggaggatttgcaggattcttatgcgaatctgacaacgaaaatcgttcagagtatgagtcatatcgataaggtgtatgatttcaagtatttgatgaaagtggacgacgacagctatctgaagttggaccttctatcggaagatttgctcagttactacgaaaaactccaccaagtgcgaatacaccacaccaatccgatagaactgtactggggttatttcaagggagcagctaccgtccaacaacgaggccagtggaaggaaacaaactacaagctttgcgaccgttatcttccctatgcactgggagggggatatgtgttatctaaaaacctcgttacgtttatcgctacttatggttcgtcactcaatgcctacaaaagcgaagatatggctgtgggaacatggctcgccccattcggcaacatccatcgtcggcacgatgtccgttttgatacggcatggatgccacggaaatgtcagaactaccatctagtgctgcacaaacgaacggcacatcaaatgaaggaaatttacggcggacagctgtgtagtcatgaggagcaagagcaatcgccgcagacccagcaaccaaaagagtacttttacgattggtatgtccctccatcacagtgctgtaaggttttagtatagtaggtatatgtaaggaaacaaatcgaccaccagtattttactttcggaccaacaactaatgtttagtttaagacaatgtgaacatgtgatggcagagcagcggaatcgtcacggtacggttctcctaccttgatgcagctttaaacggtagcgttaggacacacgattgggtttattctacgactggggtgaggtg

SEQ ID NO: 825 - DNA, 1729 bp, Aedes aegypti
tgcgtaaaaccaatttgtgtcagtgaaaaacggatatttcgggtgaaaattgtgctctaaagtgttgaaagtagtctcaaacggaagcttaagccaacggccaccatgctcgacctggaggtggttccggaacgttcgctcggatgcgataattgggagtttattctcggcatgcacttttcccaagctgtggcaatcattcagtcgcaggtgggaatcatcaagggcgtgcaagtgttgtactctgatacgactcctctgaacgtcgacattatcatcaacctgccccaggatggtatacgcctaatcttcgatccggttcagcaacggctgaaagcgatcgaagtattcaacatgaagctggtcaagctgaagtactacggtcttccgttcaactcgcccgaagtcgttccctcgatcgaggagatcgaacactcctttggcgccacgcacccgggagtgtacgacgcttccaagcagttgtttgcgctgcactttcgcggcttgagcttctacttcccggtagatagtaaactgcaacccggttacgctcacggattgggttcgttgcactttcctagtggcgcttcaccgatcgtttcgaagatggctctctattgcggtggaagtgtcgcggagagccgtcctcccccgttgccgttgtcttgttacaatcaacagctgtatctggagtcggcatcggtactgagaaactcatctggcactcggggtatccgtttgcagctgtatacggagggctctccacgtgcgttggaaccaagaaagcaatgcttgacacgggaagtcatttttggtgatagctgtcaggatgttgctagtaatctcggcgcaccttccagagtgttcttcaaaagtgaagataagatgaaaatacattcaccaagcgctcaccgtcgtgtgcagtcgaaacgaagcgatttcttcttcaattatttcacgctcgggatcgatgtccttttcgacgccagaacgcagcgtgcgaagaagataatattgcacaccaactatccggggcattacaatttcaatatgtaccaccggtgtgagtttaatcttcagttggcacctgacaaggtcactgaagacaccccgctggattcgccggtaaatatttcggcctactccaagtgggacaccatctcatctcggttggctccggccgagcgtcccgttgtgctgcatcgggctggctcgaccaacacggcaaacgtttttggatcgaccttctgctacggctatcaggacatcatcttcgaggtaatgcctaacaactacatcgcttcggttacgctgtaccatccgtcgccgtattccaacgagtatgccttcggaagcggcagtagtgccagcagcgttagcaacagtacgcgcaatttgctgcaggacggcaacaaaagtaatatccgcgttagcgcatgaccggccatcagcttcaatgaactgattctcgatggacggtatctaagctgtgttaactagttcggaactggcattctttctaaaacgtgcatgaacatattattcttagagggattatgcgggaaggtattcactactccttcctcatctggtaagtccgttttttttctattttatctctaagttagaccgtcaagatcgattatggtaagacacagtagtagaatgtttcaaattggaaaatgtttcatacatatagcatgtgtagtactattttttcaattgaaac

SEQ ID NO: 826 - DNA, 2800 bp, Aedes aegypti
gaaacgatcaaccgccggtcaacatgttcagctttcgctggttgatttcgttcggtcctattctgatagccgcccagctggaagaacttcgatggtacaacgatacccgcgattggtaccagcaaaatctgtacatcccgaatcgggacccggagcttccaccgaaccggtatgttccaccgggaatggacgctccccagtacgagttcgagtgtgacgctcacttcgcgttgatctggaacgagctgagcttcctgcggagtttgctggataagtgtacagggtgcatcaaggagttcacgttcccggttctggataaggattactgctacaatgggctgtgttacagcggcgtagaatgtcacgaacgcagaagaaagccgtactgtggactgtgcccggtgggcttcgacggagacggaaggaactgcactcgaagaaacgagtgccttaagaagccgtgctacccgggagtggaatgccagctggtggaaactcctccgtactttcggtgcggggaatgtcccggaggatacgaaggtaacggagcggattgtcaacggaaggacacatgcgggaagcaaccgtgcttcgcaggagttagctgtcagtgggcggagaatgctccgtacttcaagtgtggatcttgtccgtcgggttatgaagggaatggcagatattgcagtcgaaatgcttgcctacaaatgccttgctactcgggcgttgcatgtttcaagaagaacgaagcgccgtactatagctgtggactgtgcccggtgggaatggctggaaatggagtgctttgtgcaaaggactccgaccaggatggatatccggatgttgcgttgagctgttcggagccgcaatgcaccaaggataattgtttggcgctgccaaattcgggtcaagaggatctgaatggaaacgggattggtgatgtgtgcgagaaggatgcggacttggacggggtggacaataagtacgacaactgtccgtccaaggcgaatcctcggcaggaagatcaggatggagataaaatcggagataagtgcgataactgtccaaaagtgtccaactccgatcaactggacgtggacggagatggaatcggggacgtttgcgatagtgatttggatggggatgggtgggagaacgcaaacgataactgccagtgggattccaattatcgacaagaggatcaagacggcgatggagtaggggacgtctgcgataactgcccggtgaatgcgaacagcaaccagaaggattcggatggcgatgaggtaggtgacgtatgcgaaacggatttggacacagatggagacggaattcaggacaatcgggacaactgctggaatgaggcgaatgccgaccagttggattcggattcggacggaataggcgatgcttgcgacgaagacaaagacaatgacggagtgctggattcggaagacaactgcagattggtgcccaattcggaccaactcgatcataatatgaatggcgtcggcgatgcctgcgaaaaggatttcgacggagacagtattgtggattggttggataattgtccgaagaacagccgtatccagcaacccgatttccgcaattttaaaaccgtagcactggatccagaggggtcaagccagcaggatccttactgggaaatacgaaatcgaggggcagagatattccagaagtttaacagcgatcccggattggcgatcgggcgggatcgcttggtaggggtggattttgaaggaacgttctacataacggatcagtgggatgacgattttgtgggtttcgtgttcggatacgtcaacaataggaaattctacatggtttcatggaaaaaggctaaccaagattactgggaaagctcgccgttcgacgccagtgcgacgtccggcgttcttttgaaattggtcaacagcaaaaccggaccgggcacatatctgcggaacagtttgtggaatgatgcgagtgtgacctcacagaccaccctcttgtggcaagatccggtcaaaaagggttgggtcccgaacacttcttaccgatggaaactgctccatcggccgtcaatcgggctgatccggttccgactgtacaagggatcgcacctggaagccgactcgggcaacatattcgatcggagcatcagaggcggtcgattgggagtgtactgcttttcgcaggaggaagttacctggtccaatctgatgtaccgctgtaacgaaaacattccgaaggatatctatgaggaaatcataccgaagttacgggccaagcagctcaagaagatcgaactgctgagggttgacgacaattggtaggacactgcaggggtcattctggatacgatattggtttaccaaaactttgaccgaaatatatacaaattttagaaatccttagagcaagatattgaatagggtcgatagatcagtattcgccaccttaaggagaaacaatgttttaatgaatcagtcaatagactgctgaatactatcaatacgtacaataggttttaatccatgctaagttagaagaatataaaaactgatcacaaacttcatatttatagcgggaattgaggtcgcgattactggatcacctgctccagttttcgcgccatggttttaatttctgttcctgaattcgccatatagattgatttcttacgggaaggggcaaatacaggaacactataacaaaaaaaagaagcaaaaacatcttaagattgacgcttgatatagcgtgtgctatttctcttgatcgttcctctctttgggaatagaga

SEQ ID NO: 827 - DNA, 2570 bp, Aedes aegypti
cgacgtcttctaggcagcaacgatgtgttcggctaggaagtgcaaaaatccgtgaaaacccgtgcttgagcagcgttgaaaaccgagcgattatcgattctaattaggtttgcgacatactcatacgaataaatattcttagatcaaattaacaatgatgaaatccccggccaccatccccatcatcatcggggtttcactgctcagtctaggcggtgcatacatttacaccgttttgaaaaagaaaaaagaagaactcgatgagtcagcatcccagccggatggaggaggattctccaagattgccaaaatagtacggatgatgagcaaagaggaagttaagattatagagataacactatccaataaagtaattccgctggtaatcggacgaaaagggtacaccttgcgccacatacaggagactacccacactaacatacaatttcgagatctagatgactctcatcagatttgtgagattcaaggatcagaagcgggcatccgcgctgccgaagacctgatcatgaaggaagcttcacgacagattaccgaaactgaagagatgctcgttccacagagtgcatgtggaaaaatcataggtcgttgcggtgatgagttgcaagaaatttgtcgcaagtccatggccaaggtatggattgaaggatctcgtacgttgggcgatagtcgtcgcatcatgatcactggaacgcctaagcagataagcgttgctaaatcgcttattgaaaagaaagttaaggaagacgccgacttcaaaagaagccaagagcacctggacatccgtcgtgaaccacgtattcgaactccgccgagcagcatcacggcaacaccgatcccgagagaagtgcttcctccggctatcgaaaaactcaagtctacaggttcagtcagtcagttggaagtttttgtatccgcagttatttcaccgagtcgtttctacttgcaactagtcggtccccagtcatcagaactagatgttcttgtagacactatgacccagtattacaatcagcaagacaatcggaacatacaccggatacgtaaaccataccttggtcaaatagtggcagccgagttcaacgccgatggaaagtggtatcgggctgaagtgatcgccatcttaccgaatgagttccaacccggtgaaatagtgttggatttgttcttcgttgactacggcgataatcaatacatcaaaccttccgatgtgtatgagttgaggccggacttcctagcccttcgcttccaagcaatcgagtgttttctggcacacgtagagcctaacaacgtgatcagttcaacaacgggtgaagaggagtgggatcctttggcgatcaccagattcgaagagcttacgcatgcggctcagtggaagaagctactctcccgcatagctacatacaagaagaaaggacatcgtaataatcaagaatctcgagaaggttcacctattcctggcgttgagctgttcgatgtcttagcggatggtgacaacgtcaacattgctctggaattggtaaccgagggtcatgccaaggttacgcccaactttggtgatctctgccggagtcatgtactgcggctggacggaggctcacaggcgtctagctccgaaagactcaatgaactttcatcagcttccaacactaccgacacagtatcgtctgtagttacgacgattcatcccatacggatgccgccgcaggagacggctgaggcggagaaacctagttcaacgacatcacctagaagggaaccagcacacaccagtagtaatgaacctgtcgtatcatcaattgagacaatcccacaagagcctaacaaaagtctcactgatcatgatgcaacttccaacggaagtcccaaagcagattttgtttcaactaacgatttcctacaagctgaaaagacgaattcatcaacacttcgaaacgaaagttttaacgacgtaacaagtaatagctatacgaatggtaagccgaaaagcaacggttcaatgatgcgagattggaacgaacttgtggaagaagagcagcaaaacaatggtctgataaattaggattaaccaatttgtcctttttcgtaaattcaattttaactatattgatactcgcctttaactgatagatttattagtgtaaatagcttgatttggtttcttactgtatattgtgtttgaatatattgatttccagttcatcaaaattgttcttattattattaagtagattttagtcttgatgaagataaaaactattgtacttatgaaaaaagatatgatgaaacaacatatagctcatggaatgaaaaaagtgaattatatttttagaagaaaagtgtttaaagcattgtttgagatgtattataggtatgttaaagacaaatagatccaacaaagattcaatgaattctgacagtagcttttgaagcctagttgaaattaaacatgtctgaatagactttttagatatagaggtcgctgattatctaaacaatttgtttaattatacaaaattctaaaataaacaaacctttgatgtttagcaatg

SEQ ID NO: 828 - DNA, 1053 bp, Aedes aegypti
cacaaacattgaagcgaaattgttgttgtttggtagctttttgttgatatctgcagacaaggattcggcttgatgattcgcacatttcgattgtcgttatctcttgtggttggctgtttgtgcctgtagaaagctgctttttcgttcagttcaactggttgatcttgcgctagtgctcgaagatactttcgtttttgttgttgtttttaatttgtataattaaaacatgaagaagttcagcttaatagttgcagtttgtgccaatggtggaattggcatcaaaggagatctgccttggagattgaggcaggagttgaaatacttttctagaatgacgaagaagatcactgacacaagcaaacgcaatgccattatcatgggccggaagacttacttcggtgtacctgagtcgaaacggcctttgccagagagactgaacattattctaactcgagatcccagtgccaatacttacccatctgatgtgatggtgtgcaaaagcatgcaagaagcactgacaaagctagatgaatctccgttggctaatgaaatcgaaaaaatttggattgtcggcggcaatgcagtctacaaagaagcaatgcaatctgagagatgccaccgtatctatctgacggaaatcaaggagacgtacgaatgtgacgcattcttcccggaaatcactagcgagtttcaactggtgaagaacgatgatgatgttcctgaggagatccaagaggaaaacggaattcagtaccagtaccgcatttatgaaaaacttcctaaatgatcatcgcaacatgttattaatcattgttatattcattccactaacataatagtgacaaatatgccctaggcaaaagccacgttaataaaaatgataattacgaaaagactaattaacagtgtatctttcttagccttgtagaccacacatttttgtaacgcccatgaatatttctgcccgtttcgcccaggagctaaaaatatgttgtaaattaaagttcagtttcatgcacttggagcatcaaaataaacttattaaaatcgcgt

SEQ ID NO: 829 - DNA, 1750 bp, Aedes aegypti
ttcttctatctgtttctgttgctacgaatgggagtggacggtgccaaaagtttcaatcgaaccatggaaaaactgccgcagtcttttgccatggagcctcaggatcaaacggccgtcgttgggtcgcgcgttaccctaccttgccgggtggtaaacaaatcaggacagctacagtggacgaaggatgactttggattgggaactcaccggaatctgagtggattcgagcgttactcgatggtgggcagcgacgaggaaggagatttttccttggacatttttccggttatgcttgacgacgacgccaagtaccaatgtcaggttggaccggggaaatttggaactcctgggattagatcgcgctttgcaactctgatggtgctggttccacctgagccaccgaaaatagtacaaggcgattttatggttacgactgaggatcgagagattgagctagaatgcgtttcgattggaggaaggccagtagcagagatcacgtggatcgatggcctggggaacgtgctggtgaaaggaatcgagtacatgaaggaggcgttaccggacgcacgtcgttttacggccaaatcaattttgaaactgacgcccaaaaaggaacaccataacaccatcttcacctgtcaggcacaaaataccgctgaccgtacgtatcgttcagctaggctaaagctagaagttaaatatgcaccgaaagtgagcgtcaagataattagcggcgacaggattgtggaaggcacagacgttcggtttcgctgtcatgcagatgccaacccaccggaggtatcctacaagtggtacataggacacgagatggtgaacggaaacttctccacggaattggttatatcgaacatttccaaaaagtttcacaatgctattgtcgagtgtgaggcacggaatgttgtggggaaaagtgaagaaagcgaaacactcaatgtgcactacaggcctacctttcgcaccttgccgaaatccgtcgaggctgacctaaatatggtggtgactttgtcctgcgatattgatagtaatcccgtggcggatattgtttggattcacgatgaaaccggtcgtgctgtatcctcgctagccaaccttaccattacggtgacccatgaaacggccggtcggtatctgtgcaaagcttctgttcttggtttcccagagatagaaacggaagcgaccgtctatctcaagggaccacccagtatcatctcacctcggcagcagtttggaacgattaccgacaccggtcaactggagtgtgaagcgttttccattccacaggcgaaacatatcatctggctgcacaatggtcacgaaattaacactagccacgaaacaggctacagcatcgtagagagtgtgctgccggaaggtgtcaagtcaacgttaatcatctacaacagccagcaggagcactttggtggctacaattgcaccgtcataaatgattacgggatcgactttgtggaaattgatttcgtttcgaaaggtaggtaattgctctgtggttcgaaactttcgatgtgcatgtgtttgattgaatgtgagaatgaagaatggtagctgaacgtgtgcaatcaatagttgttgtaacttttgtgaaatcattaattaaacccaagatgaaaagaatatcaggttttggataattcgttgaagtgtattgcattaagattatttttatggcctaatctaatacgcattcctcaaatatagttcctatttcgag

SEQ ID NO: 830 - DNA, 982 bp, Aedes aegypti
atgtcaaaatcaccaatcacaactttgtgtgaagcctgcttagcgtgctcacatatcttcgacgtcgatgtcgacgtcgtcgtccctgtttttagttgttctctcgttgccaagcagtgcggttcggttttctacatcgttttggtgagtgcgcggcggtttttgtttttcgggcgttggattggaaaaaacagtcccaaaatcactcggaacattgacggcgtttgtttcgaagttggtaccgtttgtaagctggaaaaaaatgcacgcaatgtattgaaaagcagtggaacacttagtggaactttgttggcaaaattgtgcagtggaattgacactgtttcaactcgaagcagagtgaagtgattcaagcaagtatatctaacaagtacagaaagtaaagaaaaaagaaacacgacgacagcagttgtgtgttgttggcattttacatggtaaaagaagaagaaaagtgagtgtatccaacggaaagagagcgattcttattgattttcgcgaatgttttcctcctggcttgcaataatagtccgcggttgacggcgggaagaggcgaggagggattgtggttgtggccgtgagctgggaaagcgatagtccagttctcgcggctggcgaagaagcctcaaagtggaagagtggcgaagtggaatccggttctacaaacgaccataagaatacatacgtacacgtactgcttggtgctactccaggggggtttcttcttctttcccgatccgagatagatgtattgtacggtgtccatgtagacgaagaagcaaaagtgcgaagaatagttcttactgaagacgaccgcgacgaagacgacgacgagaccccatcaacaacaacaacaaccagatcacggatgttgggtctctgagaaaggaagtgaacataaacgaccaccgctcgcgtgattgatttagttagttttagtttcgtgaagaagtgaaaaaacccatcg

SEQ ID NO: 831 - DNA, 1680 bp, Aedes aegypti
ctgttttcatatagtttattgttgtttatatatatttaagttcatgttgtatagaatgttataattgtaataattatagttatttcaccacttttttgttgttttacacatcatacctgtttgcttgcgctcaatatattattagcaataataattattttaataatagtaataataataatgatgttctcagtttcggcttttctacaaacccccaacttatccgccagtaaaataaaaacacgtctactactccctactgtttaccatttgttttacatttgtgtgtgtggttgatttattcccgataaggtttgcatttgtctagacataaaatccctttacacacaatcggttacgactatgtatgtacgacgatgacatcactgtgtccagttgtgtgctcctcttgattccgttagttctagcccctaggtttgtttctattgttcgttctaacaatggggggaaaaggggggggggggcgaacggtaggtgtgctattattgttactagattttctcttacctcgaataaatgctaccaaaaaaacacaaacacacacatgtttatttcttcggataaatttcctacatttgtctcggtgtgagtgtgtttctcttacttctgttctcttcagtccttcgtgttactgtggtatgggttgtcccccttttaaatttctgtttctcgtccaaaattttggaatcttttcttctttgttccaagtacatgaatcaaaacccaagtgttcctttctggtgtgtaaaaacctatccagctctcacattccgtcgacacgattgctgcaaaattcgcaaaaaggtactgttttgtttacatattattttcagtttcttaatcgtttcgaaaacaacaacaaaaaattgcaagagagacctctaatgttcgtttttttttgttaagattatccgatttgactcaagactaagaagagaaagtttgaatggttagatttcagcgtttattttatggcgcacaattagtactgaggggcatcctaaagtagaggggggaggggcatacaacaacgaacaaaaataggaccctaaactaactatcactaatggagttttgtgtttttttttatctcggttttatcttcccttgcttcagaacacaatttgtaaaccaccttacaccgaccggatggtttcttcgcaagggtttgttcgtttacttacattgttttagtatattccacttgttgtaacacacttttgatttgttttcaattggtttctacaaagtacatcaacactcgctacaaacattcctctcaggacattttcattctctgcgtacgtggaacaaattgctttctttttttcttttgcttcctactcggctatttgtatatatggatacgtgggcaggaacgaatttggaacggaaaccgaaagctactgtagttttgtatagtttacgtttagattgtgagaatgtatcgattaggaatatataggaaaattggcaaggcagcggtttctgttttgatggaattgtttgatttcataatggcgggcgagcgcggaacgttgtacgagcagagtcagcaaaatcgcgatcccaagaatagatcaaatcagataactcgtctgataatggaccagagatgagatttagatactgttagtatcagcaaacaatcattgtatt

SEQ ID NO: 832 - DNA, 828 bp, Aedes aegypti
atggaggaggaactacgttgtcctgtttgtaagcaactgttctctagtccggtgctgttgccgtgctatcatgcgctttgcttagcgtgtgccttggacatccagacaacagcaaatcaagtccaccacgctccggccgctcatttgcatcaacagcactcgtcgcagtcgtcagcttcatcagttagcactggcagttcaagtgctaccgagagcgtttcttcagatcaggatcaggccgacaaagttagcattttgagtgaagcagactctggggtaatttgctgcacttcacgtccaggctcgtacgccggcactccgaatcttcaagggctgttgttcccaccatcgggttcaggatcggtattctcgctcgcttgccccatttgccgtaagatcgtattctttgacgaacttggcgccagaaatttgccactgtatcgggcgatggaatctattgtggatcgcttctgcgaacgtgaagccttgagatgtcagatgtgtgaaactgaaccaccgaaagtggcatcggtcgtttgcgagcagtgtgaaattcgttactgcgatggatgtcgtgaactttgtcatccggcacgtggcccattggctaagcacacacttaccaagccgcgtggcgcctctcagcttcgagagtcgatctgcggcgagcataacgagccacttgccatgtactgcatgggctgcaagctgccgatctgtagtcagtgcatggccgacaaccgtcatcagtcccacgacttgcaatcgatcatggcgatgtgcaaagctcaaaaggtgagtcatttttgtttttggttcctattgtaa

SEQ ID NO: 833 - DNA, 1101 bp, Aedes aegypti
caacaacaataacaacaacaacaacaatgaaaaaccaaagggagacatccaccatgacacaggcctgaccgacgtcgtgatgaaagtggcccgcaaagaactacgcgaagacaaagcgatccgcgagcaggcccttgaacagatgcgcgaatggctcaaacaaaaccaagatgtcgagaacgttcgcactgacgatctgttcttactcaaatttctacgcaccaagaagttcagtgtcttcatggctcagcaaatgatcttgaagtatttgaaccttcggaaggtccacatgcacttgatgtacggactggacttcctttcgccgaaattgaacaaactgataaacaacggttacatgtttccatcgccagtgcgagacaagcatggcagacggctgatcatcggatttgcaagaaacttcaacccggaagagcacgacagttccgacatgtcccgagtgcacgcgataacctacgaaaccctacaggaggacgctcagaaccaaatcatgggctatgtacacattggagacttcaaaggcattaccacggcacacgtctcctgctggaatccgaccgattttctacgcatgatgaagtggggtgaacagtcgattccaatgcgccacaaagaggtgcacctggtgcacgttccgtctgcagtgaaatacgtcattgaagctggaaagtcgatgattagcaagaaaatgaaggaacgacttcaggtaacgattgggatggcattctgttacgactcaaatcgttgagttggacgttatgttatatacatcgtctacacttctttacagtcgctaaggataggagaaaggattaaagcaaatgttgatgggaataagattagtaggttgatcatcaaaattgacctaagaagataatctttttccttttagggagctttatatgcaattactcaacaaacttccaaagattcccacagaaggttctttcaagaaaatagtcattttttctgtacagagtttttaagaaataagttaatgtttttttttcgggaatcccaagtacttctcaaaatgttcctacgatgatttctcaagccattttcaaacgatttccttcgtga

SEQ ID NO: 834 - DNA, 816 bp, Aedes aegypti
atgattaatacaaaggacgaagtcgtaaactggttcaaagagttacagagctacaaccggatagatacgatgtgcaccctgctcaatatgtgccttccattcgagctgcgcttcctggggacgtgtttggaggagctcggccggcgagatgcccaggaattgcgtggcatcgaactgcgggtcaacaacccccaggagttcatctcggatatcgcttcctgccagagcggagaacccacggatcggaagaaccgccggaagatggccatgttcctggcgctgatccgagcctgcaatcatacttgcgtgaacgaactgttcaagacgctcgaaggctggggcaatcgggattttgcgcgactctttgacgaggacgtactgcaggagctgctgttggtgtacaccatggccacgaaccatcccgtcttctcgttcgagcaacgcatgaagtgcggggacatattcaacaaactgaagagctgcgagctgaaaaccagctcgggaggaggtggtcatcacccccaccatccccaccaacaggagactgatagtctatcgaatgcgacgcccccgccgcctaacagtgcggggacgcccttgggaatgggaccagggtcggcgcaaactcagcctcctcagcctcatcccatagcatcccaacagcagccaatccctatgcaaatcccgttgccaccccagcaggcagtaccgccgccacccactcaacaacagcaacaggtttcgcttccgatcccgggttttccgcaggcgccgatggcacaggtaggtggcttgttagcgaatcattatttttag

SEQ ID NO: 835 - DNA, 1475 bp, Aedes aegypti
atggtaatacttgaaggagcagctatgttacaaatcggaaataaccagtatctgcagccggattacatgtcgccgttgccaacttcgttggacgccaagaaaagcccgctggcactcttggcacaaacatgtagccagataggagcagattctggaaatataaccgtcaagtctttggtttccccatcggaaaagaacaaaaaatcttcatcgtcatcatcgtcgtcggtttcatcggctggttccgtcgagaatggacctcactccaacaactcaagatctccgtcggtgaagacagaaaaatcagacgcatcgccagaaatcaaacttgctttcaagccatatgaaatgaatgtgctaactacaaaggtgaagaatgatgatcgtccgtcgtcaaagatgagcagtggaaattatcgctcatcatcgcggggtagtgcagaatctcctcgtgcaggaagtgttaatggaaacaagaacggtgaaataagtgaaaatggtaaaagtacacccgagggtagcagtaggaaaaccaattctccaaatgatcgtgacaaaacctctgctagccctattattcgtccgggtgccgaagttatgcaagctggaaaagatatgtcaggatacaaaccaagtgcttacggaataaacccactaaccggattaccgtcgccgtcgggcattgatcatacaaatccagcgttcagacctccgtttgctggagccttcagtcatcaccatgctgcaatgttagcggcggcataccctggtgcagctgctgctggtgccaatccatacctaagttacaccagggtcaaaactccatctggcggtgaaacactggtgccaatttgcaaagatccctattgtactgggtgccaattctccgcacacaatcatcaaatgatgatgggtggtcagtgccctgcaggttgcacgcaatgcgatcatcaaaaatacagtctcgccatggccatgggaactcttccgccgggatatccctatccaccagcggccacgcaaccaggccgtccctacatgtgcaactgggttattggtgattcatactgcggcaagcgtttcaacacgaccgacgagcttctgtcacatcttagaacacacactgctaatttgtcggacccagcggcactggccttgcagcagcaactgatgccgttgagtggaatctttccaccttcatcgctacatcgtggatatccaaatccacctctgagcccgctttccgctgccagatatcatccctacgctaaacctggagcattacccgctggccttcccggatccccttatggagctgcattcaaccctgctgctttcgggcaatattattctccatacgcagctgccttgtacagccaacgaatgggagccgcagttcaccagtaaaagcgccccttccattcaaagaatgcccaggtgttattttctatgaatctgtgatattaactttattc

SEQ ID NO: 836 - DNA, 1213 bp, Aedes aegypti
aaacagtctattacgatgaggaaaatacagtctactatgtttgtcgcttccaacagttttccataaggtttcttttacgttagtcgataagtccatgagtcttcctatcgtgtaggtccttttgaattcgactcatagaaattttctagcatacagtagatcagctgtatcacagaaaattgcgtgaaatacttcacttccataacagggtacaataggtataccatagcgcgcccgtttcaccaccagaagatccaagcattaacaaaccacgtcataaaatttccaatatgggtctcagtaatgcttttcaactgtgcagtttgatttatgctagtttgaaggtgatttacctgacgatagcactgtatcaggtggcattttgttcaagtgtggagtgccccaatgaaaactctataccagccgccttcgtaatcctattggtgatgatattccccgctttgatgattgccggaatattgaagaaaaatctccaaatgcttcgcatctgcaaagtgtacaacatcgtggagaaatcagtgatcatattcggccagctggtgatgatcatcatgatggaacgagtctaccagctctaccgtcgacgccattacgtatccgacgaggaagcaatgtccgttgagctggcctacggactaatggcaatcggagtcctgcttacagcactctacttgattttccgcaactggatgatcgatggaaccatagcatctatcaaggaggatctctacatcttgaaccgggacaagtatgtcatgcaatacaactgcgaggcatgaacgcatcaacctactttgttatgtgtggtcccacaccgcagaatttgattgttgtttaatgcgatacatttttgtacatcgaaggttactaaaaagtaaccagactaagaaagttgaatagaaagtaagaaagttgttgtgaaatgatcgaaaaacagtttcatgcattattattttcattattaatcaaacgaagtataaaaaagactaactatgcttcagaaaattgatttcttcaaaagaaattcaagcttctcactgttagtaaagtagtttaaccttctgtctgtgcgagaaaaaaaaatacgttgcctgtgctttgactccaaatttaaatcgcgatagcttccagacatttgaacgaatttcaatttttctacagttctagaaataaaattgaattgagtttttct

SEQ ID NO: 837 - DNA, 3915 bp, Aedes aegypti
atgctgatagagtattgtgatggtggtgccttagatagcattatggttgaactagaaaaacccttaaccgagccacaagttgcctacgtatgtaagcacatgtgcgctgggctaaaccacttacacaagaacaaagtgatacatcgcgatctgaaggctggcaacgtattgctgacaatggacggtggtgtcaagttggcggatttcggtgtttctgcgaaaaacaaacacacgcttcagaaacacgatactttcattggaacgccgtactggatggcaccggagctggtactgtgcgagacctttcgggataatccgtacgatttcaaagtggatatctggtccctgggcatcacgttgatcgagtttgcccagatggagccaccgaacagcgaaatgtctccaatgagggtcctgttgaagattcaaaaaagcgatccaccaaaactagatcaaccttcaaagtggtctaaaagttttaatgaatttctcgccaaagcgctagtaaaagatcctcaacaaaggccttccacggacgttctcatgggacatccatttatcgctggtaatctggattccaagccaattaaagacctgttgcttgaatacaaagcagatgtcgttgaggaggaattggtggatgaagaagcagaggaaccccgcaattctgcgctcccactcgacttggacgatgactcatcgtctctacaaagtcaagaaacctataaacttccagatactcccacatccctatcgaaatcatccagagattcgaaagaatcgactcccgttcctgttgaagatgatagcaaagcgaaaccgggagcagcggtcgcagtcgcaaccacggctgcagtccaatcgccttctgatgtcgtcaattcttcggcgcccagttctcagtcagcgacagctgcaacaacgcctgtggctagtgatagtaatagtaatgtacaaagtgatatcaagaaatcacctacaacggttcctgctccagtattaccacccaccgcacaacgacctacaaaagaaagcgaaggtgaacagactgaaagtggtaacaatagcaacagcagcagtgctgaggttgaaaagaaaggtgtcatcaaaaaggagaaaggaccggctcctccacctcctcacactccttcatcgccaagcagtcgaaatgctcctagcgttgatcgccctgatactacagtgatttcaaaaccagcttccccgttgacgttggaacgcgaaacaagcgtagacgaacttgtaaaatcacccaaaaaggaacacgctccatctcctccaaaatcttcaccgaaagagggtagtccatcttcatcgccacaaccttatgaagatgacggtgtagtggtgacaagttctgccagcagaagacttattccagacgacgacacagttgatctaagaatcgaatcgccaaagcccaaagatgaagaacttttaccacttcttgccagtaacgtaagtcagataactgtggttacaagccatccgccggtgataatcgacaactcggtcgtaccatccggctcatccggcggtggtgacgaggtggtaatcgtttccaacgagctgaacaaaacccacgtaaatgaatcgtccacggacgatgatttccaatcgttggacagcttggaaaacctctcgccgaagtataggaaacagcacccgcaattgcaacggtccggcagtgggcagatagcacgtaagttagatgaaagtgaagtgctgatcgtgagtccggtcttcattggcgaggatcaggacgaacagcagcaggagcaggacgatttcatcaatgatgagctacatttagttaataataataataatcatagtaacagtaaattattggacactagtcatgtttcggtggtcaccgttggcgaggaagagatcaaggtcaaggactcttcgcatctgatcaacagtggtaccagtcatcttcttatgcagcaacagcagcagcatctgcagaaccatcaccatgattccattagcgatctatccaacgtgagttgtggtcccagcgaatcgagtgatgatgttaaggtggtggacatgatgcttgtcggatcgatggatggtggaggctcggtacgatcggccagtacaccgttgcatcatcaccttcaacaacaacaacaaccgcaacatcaccagcagcatgcgcctagcggcaaacagctggatcgtagcgatgccgaaagcatagcaacaacaactagtcacgacagccgcgaacaatcggtagaagaggaagttcaacttcgtcgaaagcctccgcccgctgaagtcgaagaggacaagcagcgaaatttcagcaaggaagaaattcatttgcaaaatttgaagaagaaaacgcgaaaacggacgcgaaagttcgagattgacggtgttcaagtcacgaccaccaccagcaaggtgatctacagcgatgaggacaacaacaaactgtacgacgatcatctgttccgcaagcaggaactgcgggagctcaagatgctccagaaggcggagaagaagcagttttacgacctccagcagaaggaagccatcgccaaagagcagcaggagaagaaattcgagcaggaacgtcttcagctggagcgaacgttcgaagccgacatggacgtgttggcgcggcagcaccggcaaacggtggaaaagtacgaacagcaacaagagactgaacttaggaatacttccaagaaaattcgtgccgaacaggagcgagatttaaaattgttccgcgacagcctcaagcaggaaatcaggctgctcaagcaggaagtcgacctcctaccaaaagaaaagcggaaagatgaattccggaagcgtaagactgcgatggaaatcgagcacgaagaacgagagaagagtttcctgtccaccctgtcggagaaccacgagctcgctctgcgacggatcagtgaaatctatcgcgagaagctttccgctgccgacaaagggtatttgcaacagaagcaaacggcgatgagaactcgagaggccatgctttgggagctggaggagaagcacattcacgacaagcaccaactggcgaagcgacacgtgaaggacatctgcttcatgcagcgacaccaaatgatcattcgccacgaaaaagaattggatcagatcaagagaatgatttcccgcaaagaagaagaactgctgaagcgacaaaccatcgaaaggcgagccttgccaaagcggatacgggccgagcggaaagcgcgagatatgatgttccgcgagtcgttgcgaatttcgatgaccacggatccggaactggaacgggagaagttgaagaagttccaggagcaagagaagaagcggtacaaccaggagcaggctcgtttcgaaacgaagcacatgaaacagctggaagagctgcgagctacctcagacggttccattagggagctggaacagttgcaaaacgaaaagcgtaaacagctgctggagcatgaaagtgccaaactgcgcgagtgcgacgaagcgctacagaaggaactgcgcgagtggaaatcgcagcttttgccgaggaaacaggctatacagcaagagcttgacgagcaggtgaacgagtacgagataaagtggggtccagtagaccgacgcgaattcgatggtgattttgtagttcccccggaaatccggaatcgcaccaactccttgaattcccgttcctatcgactacatggtggtttgcttagtatttcccggtcccgcaccttcctcgcgctaccggtggccaatggacgcaacagtatacacagttcagtgccagatttaagccgttccgttccaaatactcccaattcggctcataagctttcgctggcatcgtcctacgattcggtgctggaggaaaacgagaatgagaatatggca

SEQ ID NO: 838 - DNA, 483 bp, Aedes aegypti
atgttggaatggcactgtggcgggtggtgtgactattcccatcgccgtcccggctgtcgaggacactgttggcggtggcggaggaggtggaggaggcggcggaggccccgggaacaccagcgagctggcagacgatcccggacgccggccgcgtcttcccggtcggttctgcggaggcggatggtgatggtgcggcaacgaggtcgatgggagatagccaccggacagaccggcaggggacggaacttcccgtccctggtcctcatcttatttgccgtccctgtacggtttgcagtacgagtagcggtggttcatgtgctggctgtaggaacccgagtgcgagaatcgcttcagacacttgcagcactggaatggtttctcgccgctgtgcagtcgcttgtgctctgtgagatggtgtttgtgcttgaaggcctttggacactcgacgcatttgtaggggcgttggcctgcaggagaagatga

SEQ ID NO: 839 - DNA, 1337 bp, Aedes aegypti
aggcttgtagctaggttttattgattgtgttcagtaagaaatgtgatcaaatcaagttacattttgttatacaaagatatatcttgtttattttactacaaaatatgtcaacgtgattaggcagtatctcttcagctgctttgaagcattaggaacagtttcctgatgctgatttacctggtatagcatttaatgccgtattgattgcaaatgtcggttcaaaccgtaacccaaaaggtgacctacctgtttcttcaaaaaaatacaataactttctattcttacataaaccaaatacaacgaacaagagttatttccctggttctacaagttgggcgccacaaagttcaaaaacttcataaacacctcgaacccgatgaagcaagcagcgttggcggggaaggctcgcaacatgaccggagttacgcccttatacagtgccagcgggccttcgttcttcatcagctctcggaatacatcgcgaatgccattcctgtaggttccttccggggccgtctgcagtcgagatttgagcacatcggccggcattccgatggcccagttggcaatacctgccattcctccggcaaagatcgttatgagcagagcctttccggcgtcgtccttctcgccctcttttggcgcgaaagccttcttcacgtattcgtacgtgaggaaatacattcccgatgccggaacgtctcgaagcaaggtggcaaacgatcccttgtagatactgcggattcctccctcggcgtaaagctgcttcgcacagtctaccatgccgttgtatttctggggcacgttaccgccctgttgaatctgcagcaggcacttgatccgttctcccggggccatcacagttgtcgtgaacactccagagaacgctccagcggcaaacagctgaaggttactcagttcttcgtccggagtggtctgttgcaatcgctttcccacgccaaatccgaagaagctcatggcaaagattggcgccacgccagctatcggagcggacattcctttgtacagccctcggaacccctcgttgcggattgtcttcttggcgcagtccagagttccggcatacatcgggctttgaccagttgccgggaggggcatcgtttgtagccgcacctttatcgtatcgagcggatgcccggccagaaccgtacagatccctccgaaacctccggagagaaagtacttgatcggactcacattttcggacattttcctgcttcttcttcgccctagtctactcgggacgtattatacaaccagcaaaagctgatatcaaccaacagaaaaaaaatgaccctgctcgaaaatgtcgctat

SEQ ID NO: 840 - DNA, 1797 bp, Aedes aegypti
atgttaaccgaacatcctacaacaacagaatacgtaccatattctaaacaaatcacttccagtagcaaattgtcgacaccgtcgtcgtcgtcctccgagaagatattgctaaatgtgacaacgacagacacggtgacaatcccggaacagcaccaggaaaagtcctctacacctcaacagcaacacgaggcagcggcactattgcagtccacacctacgacgggtttaccgagtactactgcagaactatcgaaagccactggtgctgtggtgccaacatcgatggatcaatacaaaaccaactatagcataaagttcacaacttttcgaccattactagtacctactttaccagatattcgacataggattattcattcgatgccttatcagtccaagcatcatcacgagcgacattggggtccatttttcgaagagccactcaacgtgacctccggagcactgcaagtgggctaccatttgtcaacggaagcaatcctcaactgtagggtaggaatgcttaaggataaaacggtgatgtggatccgaaggacgaccgataaggtatcgctcctgacggtaggcaacaatacgtacagtggcgatccaaggataagagtcaagtttcaatatccgaataattggcgcctacatatcaacccaatcaagaatgacgacggtggcttgtacatgtgtcaagtgtctacacatccgcccagagttttcgccaccaatctcacagttctagaaccagcagttcggattgtggacgagatgggatacgagttctatgatcggtactataaattaggtagcacaatcgatatatcatgtcaggtgtcgttatcgtatttggcaaccctgccaacaaaaactccaccagcagcgccggccaacacttttcagctgatggcgccaatcgctggggatgcgaaaacgaccagcactaagctttcgaacgagggagcgacaactagcaataacaataaagataagacccggcaatcgttgccacagaacgtcgtgtggaaaaaagatggcgtcgcgttaccgaaagatatcaaactcagctcaagcctttcgaaacaatggttcaacagcaggctgtccataatacaggcggaacgagttcacagcggtctctacacttgcaccgtagccgagaagcagacgacatccgcacagatccaagtgctgaacggtgaaactccagctgctgttcaacataacggttcacacgcagaaagggccatttcggcacttgtcttctattgtgtcctttgctggattcaactgcacatatcctatacgtaatgttaccggcagaacccgcatccagtccagcgacaatatatcaatcactttgaaaaaggcgcaaccatcaagattaattattccgctggcagcaagtcactccgattcgctgatttctggtcgacatccgccattaaccggcagaagcagaagccctgtgcagatggtcacaatcagcgaaattttcgactagcatccgattaggaaggactgcccgtgagaataatgaagcgcctccggtggagataaagcgaagagaatggaacccaaaagtcatgatttatgtatcatttttcatctcttgtacaacttgaccgatctcatcccgtaaaagcgctcgtttaatcgaccgtttcagtcgaattgttcagttattgaattatgtcagcgattcacaacggctttgaatatgagttttaaatgagtttgatttttttgtcaaaatactgaaactatgtaacatatttgcagccttgatttttt

SEQ ID NO: 841 - DNA, 747 bp, Aedes aegypti
atgttgaaaattatttgtatacttgcgctaacaatttccagtgttattagcattcctgtagaaacgactacagggtctaagggtttggaaagaccttctcccatcaacccggatgtaataagtgagccaaaaccaaaagaagcttccaccagcactcctgatttagcttcatctacggcagcaagtcacatacaaaaaattccagctaaaggagctaagttaagttctgaagtggaccaacagaagcagactctcaaaagagattcaatcaaagaagaccaactgacaagaactacgacgagcaaatcttcaaaaactgagagtccatctactgcttccatacctgaatcccataaattttctgatgatacaacgaagaaagtgaggcgtgaagtcgaatcttctgaaacttcaacaaaccgctcaacaactactactcgtgctccaattctaagcaatgccgacgagaatgataacacacctccacactttatccgaccggtaccagtcgatcagatcttgaagaatattcacgacgcaccaaagcatcacgaaccatctcaggtggtctcactacatgatcatgtgacttccattgctccaactactattgcgccaacggacagtgaggatgtgcccaagagcagtggcgatcataagctccatcacgcatataaaaataaaaagaatgatgatcaatcttctgaagaggattcaacttcaggagaagatgaaaaagatcagtaa

SEQ ID NO: 842 - DNA, 1508 bp, Aedes aegypti
ctctcggtggccaacatcgagtgctctccgggtagccagcaaggtgataactacatgtcgatcatcaagcgcattcaggtgcgcggcaaacggagaatgtgcaacgggaaaagcaaaggtaagaaatgggaaacatatgtcttatggcggcaaattgtgaatctccagcggcgaaagctgttccgggcggacgaagcctttgccaacgaaatcaacgcctatgggcagctggtgccggtgatgaggcgattttcccaggatcagctaccatttccggtgtgccactatgccggcaaggacaccgaaggggacctgattgtgatggaggatctcacctgcagcgggttctacatggtcgaccgcaggcggaatctgagctaccggcagtgccggactgttctggaggagcttgccaactttcacgccgtttcgctagcgatgaaactagtcaaaccagtccaattccacaccatgaaggaaaaggttaccgaaattgtatacaacgacgctgcagccgaattctacacccactcgctggaaacttcactacgcggaacgctggacagtctacactacagcaatacggatggcagcctcgatgcccccatcaaagcaatagaaaaactcagcggccgactgtaccagataatgtactcggcagtacgtaacagtcatgagccgtggaaagttttgtgccacggtgacacctgggtcaataacctcatgttcaacgaaggccacgatcaggttaaactgattgacctgcaaaccatgcgatacacttctcccgttattgatattctacatcttctctacactagcaccggtgtagagataaggaacgcttacggagatgaactcatccgcaactaccagcaagcgctagtcacagctttgcgaatatacgtacctgccagcaaaagcttcgtccttccggcactggaggccaccttcagctacgagaacatccaagccgagtacgacgatcgaattttgtacggattgggcattgccatgtggctcctgccagccgttaccttccatccggatcacattcccgacctggaccaggtcaccatgaacgatttcaagaccaaaaatcatgaaaaaaccatcgcacagatgctgtcgaccgattaccacactcgcatgaaggacaccgttttggagttctaccggaagggctttctggataatgtttaagtagtaggggtagctcagagggaagattttttaacattttagtattaatagtcgaaatagccacgctcgaatgccattccatttatttcgattttaaaacagggtcatatatattttagttttaacaagattttttgccaatactgcagtacacaaactagctagtcaaatcagatattggaaccaccctagaataattaacttaatattgacttcacatacaaggaaatagctttcaaacgttaaccaaatgttgcaatagactaaatgtgaatatttatctaaataaaacgatattttaccgg

SEQ ID NO: 843 - DNA, 918 bp, Aedes aegypti
tttgaaatatattattttatttgcatcactttgatatttcaacaaaaaaaagtttttccttttacaagtaaaatatcattctcctctcgttttcttacacgcctaaaagtgtatttgtggggaaaaaggttatatccattaaatcacatttgcttggttcttacttcgtttcaggggttccccaccctcaaatcgagcgtgtatgtgtgcgtgtgtgtggcaccacccaccgctcaaacgaaattttctttttctacagttcaccaattcaagtcaacctacaagctaagagagatattgcttccttaccggctaaaatcgcttactcaactaaattctttaactctccaaacaatttggaataccgttggatttcgtaccaaatttctacgcgcgttagattcgattcggttttttgttctggggttttggttctcgatttctgagaaaaatgtgtattattatatgtgtgtatttgtgtgtttaagaggttttgatctttgttgtgtggatagattgttgcattgtcgactaacatcacgcttcacttccgtttcgtccgctaaaatttgatacaaaattattttgcttaaaattggctgtcatttccgactaagactatacataaatacagtggttttttgcttacaaaaacacagcggaagaacaaataatttacaaagcaaagccttacgtgctaggaaagtattttcattgtattctagtgttttcttgatcatcacattggctcgaaggatacttcgagtggggtaattttgatatctacgaggaagtgttcgaatcactaacacacggcactgtatgtgtctccatttatgataagggccgaggactcatacagtccgtgagtgttctgatggcacttcctccagggtttcgaattttttggattgtgcc

SEQ ID NO: 844 - DNA, 5745 bp, Aedes aegypti
atgtcacaaaccagtcaaggttctacgaaatctacggaaaaaactttaatttcgaagcctatcagaagttcatcttgcacaatcccttcggaaatacttgaatttgactactcctacggatacgattgcaaacggcctttcaatttgtgcaaaattgacgatgcaacgcttgtattcgcttccggcaatttgatacatttcttcgacgtggcaacgcaaaccgtaaccacgcggcgaagttcgaccggtggaggaatagggtgcatacaaacgaatcccaatccagagctatgtcacttgaccgtgggagaaaatggagtcaacccaccgatcatcatctaccagtatccggaaatgagcgtggtgaatattctgcaaaatggaacaactcaagcgtacagtcgcgtggattacagtgctgacggggaactattggtttcgcaaggttgcgatcctgactacatgttaaccatctggaactggcgcgaagcggaaatcattctacgttgcaagtcgttctccaacgatgtgataaacgtaatgttttcaccgacagttcccggccatctgacgtcatgcggcctaggtcacataaaattttggaaaatggcagaaacgttcactggtcttaaacttcaaggagagcttggccgatttggaaaaaccgaaatttccgatatcgtaggaatacttccgatgcccgatgaaaaagttctatcgggttgccagtggggaaatgtgctcgtgtgggaagccggtctcatcaaaatagaggtttgtcgcaaagggcggaaaccatgccatcaaggtccaataacgcagataagtgtacgtgacggtgaagtgatgacctgtggaatggatggatacatcaggatctggttttgggaaactgttgagttggcagatccaccggatgatgatcgagtagtgcagattgaacccattatggaatatagaattggaaacgatatctgtcacagtgaattgatatgcttgataaagaaggaaggagactttcaatggtatgctcaagacggtaatggaggaatttgggaatgtgacataacaccggcctacaaaccagcagaacctcaacagctgctgaaatgccactctggaccaataatggcagtgcaaaccagtcctactacacaccatgtggccactctagggcgtgatggtaggttattcatgtatgattattcgaaacggaaaatggtgtttgaacacagattcaactcaagtggtcatgccatgatttggcttcctgtgacactggaaccttctggtatgatcttagttcttggttttggagacggattcattcgcatcatcaaggttaacctgaattcatcgagcaccgaatcgcctgtttgtattgtacaaataattaaatctcactcagaaccaatcacaaccctggcaattaatcagcgagaaactatattagtatcgggttccgatgacaaatctatatttgtacaccaattgattagaggcctgtccgtcatcaatatagaaccgataggtttagtatacactccatcgcctgtttctactatcaactggaaaccaaacgcttttgctactgctctgattgggtgtcgtcatggacaggttctggaaattgaacttcctgaaaccccaacagactataccaacatatcataccatctgaaatccatcgatataagacaattaacattccaattagtgaaatcagaaataaagcgaaacattcggattgcggaaattgaagaacataagcaacaaaagcgtgctagaaaaatgaaaagcctggaaagaattcgggaggagaatccaggagtggaaataaatgaggacgcgtttttagaggattcggaagacgaagaggagttggagccattatacattcccaaggttccaaacgccgtattgtgggctcaatacaccgaagataatactttgtggttatcgatgggtggctacgatgccggattcgtctatgaatatgaattcgatgacgaagatcctgtatcttgcacacctgttccgggggcagaagataccgagattaccacatatatctacgatcaacaatatttgattttcggaatgggcgacggatcgatacgagtaaacaaagcgaaggaagatttccgagatttgaatgaatacttcaccctcaatatgcattacaatctgaatggcaaaatttctggactggcctttagctacgacaatcggcaccttttcagtgtcggaacagacggtaatttgttttcctacaagtggtatgcttcgacagtaccgacagccccaccaaagccaaagtcctttgatatgtctttaccatgcgttgaggatattcaggacccgacttatttgtcacttgaagaacaaaaaattaaacaagaaaacgacagaaaggctaaacttttgaacgatcagaaaaatgaaattttaagtacagtagcagactatcggaaacagtttgagcaaatactagccagaaatcaagctctcccggagtctcaacgattcacaatggacgagtttactctagatgaaagaataacagcagacttgaaacaagagctgcaggaaaagatggatctagtccgacggaagacggcatttgatgtggaaaaggcaagactttcaggagagaaactaaggaaattctttctagaagaaatggaacacgcaccaattgaagttctgggagtgatagttccaacttcagtcaaatcgttcaggattggtaaactcacggatgaatactaccagactgtagaagatttggaacatcgaatcgaagaggaggaagctagaagaagaatgataaaagttcctgatcatgccaagctagatcgtcgtgaagactctcagttcgacaaaaaagaatcattcctcgatgggctaactcaatcaacaattgatttcaagctagaaacaaaaatgcgtcgcctattggctaaatatcgtgagaggaaatcaaaggaacatattcgtaagctggagtgggaagatctgaaaagccgaaaaccagacccaaacgtcaaccatcccgaagatgatgcagccatcaaggatgcgacaagtaccatcggggactacaaattgaaaacggatcacgaatatgaaccaaatgaagaggaactagaaactacactcaccaaataccgcgacttgctacaggtgagaaaagagatgttcactatccgcagcaactacaatgaagaagtgtttgcactaagagagaaaaagaaagcactcaagaaatatgtagaagagaagaaacggaaactcttagagatccatgaagaaattcctgaacatcagcggaaaattcctccagttgaagtgatcatcaataaggctcttgagtatcctgaaaatgagtttgaaatggaagccgatttgaactcatgtgacgaagatgataaagtcaagaagcagccgttagaattgggaagcaccgaatatgcagaacgaatgcaaaaatatgttctagggttggcaaagttaccaaacggtgctccttacacacctttgggaacagagtgggaaaaggagctaagggaaatgagattaatgaaaaaaatgttcaaacaggataaaatcatagataaaattagtaaaagaattgatgaatttgatcttgagctaaccgagctttccgaacgtcgaatgcaggtcgaagttgatgccaagtatctagaaatttatcaactgaccctttatcaagaattatggattttgaaagactttgaaaaaattgagcgtaagatgatcaacactgtagaagaattaactatagagaggaacagtttacaaaattctgttgttgaatccaaactgtacatagaacaatccaaacaagatatggaacaaatacgatcggaacaaaaagccatatttcatcaatttacggccagttgtgcagataacagtttttcaccgtttctgaaacgtatctacaaaaagaagtacaagccatgcaaaatcaacaacgacagagacgaaacggagtcctcgagcgagtattcttctgaggacatagatgcgttggagaatgctgttgatacagaagtcagtaagatattcctagatgaacagccgtgtccaattgggtgcgatccggaattgtatgaactcactatcaaactgaggaatgagaaaatcgagttggaaaaaagatactacgaagagaacagatcactgaacgaaacaataaaaaccatggaaggattcaagatgaaactggtatacgtagaagcaagacttaacgataagaaaagagagctactaaacttcaggcgagaaaaacaagcaagattgaatgatatagatacacttgttatactgagaatggatcaaatgcagtatttcaggacagaaacagaattctatgacatcgaaaatagtttgttgttcaacaacgaaaaactaatgaagttgtatgctagggttggacagctggctatggaaactctggaaaccaaaagaaagcatcggattaacgttgttcatttagcacgaatgcgcacagatattaaatacatggatcaacaaattatcgtactcagagatgaaatcaatcaagcaatgatcaaaaagtttggacgaataatcaatttggacgaattagaagagactatattacgaaaattcgccttcgatatgagagcaaatatggatgatgttaagaaaagctatgcggaaagaactagagatctcaaaagcctttactctaagaaacaacaggagctgacaaaagtaattcaagaaggcacagagaagttacacgtcttaactgtattacaggaagaatataacaatctaacaaaaatgctagcgcaccagaaaaaggtaatggaaaagaaagatcaagtgccggttaattatgaatcagatttggcaaaacttaaagaaatcgcaaaagctcagaaagaacaaatcaatatgcttcaaagagaaattcgaacattgagcatgaaatgtaagccacttagttctgatactgctcaaatcatggaatctttgcaaccgggaatgaaaccagggaaagtaatggatgactcttcatatcctaatgttatggattcagcacctcccagcacaagagcaagttctccggacaacttcttatataatgaaatttcatcattggttgacgatttcctggttgaccatttgggaacatttgttcaaaagtcggatatcaagcgagttgttacccacttgtctcactatctatccaatataattgctaattttgcacctgaacacgccagcgatctgcttccacatattatcgaaaacttcaagtcatttattccagaggaacttctcttgactattcctcctcagtctatcgccgagttgattgagaatatattccgcacattcaaggaaggctatgatattgacaccaaagagatcctcaacgaaatcatcaacaacagtttggagatggtgcctcctgcttcgcaaaactactcttacaacatcctagcagatatactcaaacaagtcctatccacgctgcacatcaccgacataaaccatccagaaacggttaacttcattgctaacggccttcggaacaaaccgggaattgatccaccagcagtcaatgttgaacagctgtcatatgagctactacaatatgcatcagagaacatggtagatgatgtcagtcaagacactatcagacatatcattgaaggaatcctgcatgttagcgctaagtaa

SEQ ID NO: 845 - DNA, 579 bp, Aedes aegypti
atgaggctaaatgctcttttagaagacgtttttcagctccacgtcgaagaccagagtgctgttcggggggatcaccggggggcttcctcgggttccgtaggccaactggtggggcacggtcaatcgtcgcttgcctccgaccttcattccggacactcccaaatcccatcccttgatgacttctccgcggcccagggcgaacttgaagccgggtcccttgttggtcgaatcgaacaccttgttgttcttcttcaggcgaccttcgtagtagacggcaatcttcttgcctggcttggcttctgcgccaccgccgactttgaggtcttccacgaccagtccaccctggagggtgcgtgtcttagcttcctgctgctgttggccatccttcttcagttccttgggagaagctttgccattttcgacgccgttctgcttggagcccttcttttccactttggcaaccttggctttcggttgttcgtcttcggattcgtcctcctcgtcatcatcatcatcctcatcctcgtcttcatcatcgtcatcttcatcgtcgtcgtcactgtccgcttctccgtctaa

SEQ ID NO: 846 - DNA, 1265 bp, Aedes aegypti
cattctgcttctttcagatgtttactcacaaacgacctaattggactgacgggcatgttcgtccagatgtacttgcatcgatacctgccgcaggaaatcgtcgaagctaacatgcaccatttctgcatcttccgggtgatttggcgcgtgttcgggatcagttccggctgtgtcgcgtttgtcatggctctggagcggtacatcgcactgacgaagccgttcttctatcataagcatgtgtctgataaaatgataaggagatcgatatttctgctctgggcggtgggagcattcttcacgtttctccctttgttcggcttcgggatctacttcgacgaaaggaagcagacgtgcatccgatatcgggacgccaccgacccaaccaacgtcgcatacgcctatctgttcttcagtgtcggcataatcctatgcacgggaatagtgatatgcaatctcagcgtacgcagggtattatatcagtcccatcacaaaatgcgaagacagttccgctcaatccaaccgatgccgatggtggaaagagccaccctacggagctcgcagaaatcggcaagctttactgactcgtccatcttccggatggtcggcgaaccaacgacagaggaaatacggttcgccaaactgatgacgttcctgagcatcagtttcctcgcttgttggcttcctcagatggtctcaatccttctggcgcagctgctgaaaccggacgtaaaggcacggtttacctggttcttcgctctgtccgacatactgatcctgctgcacttcatgctcgatccctacatctacgtgctactgcgacagagtggccgcagcgacttacgaaccatgatccggttggcgtggccagcgcgaaaagctcccgcgagggacaaaggacgagacacggttaccacgacggatacgagtgactgagacgggggatgctttcctctcgtcaggattgggaatgttgtgtcaaagcttaatcaaaaaagcctatcgctgtaccaaaatacagtaaaacaaatgcacacatacctattctagtactgcaggaaaaaaaaatactcaggaatacatttttttggatgttcctgagcgccgaaacgcaattttatcagtctaccatcatcgctttggtcaaagttcaaataactagtgcatacgtaacaaaccaagtttggatgtgatcaaacgttgtcgaacaacatacattatgttaccaaatcaagagaaatatattatccattggatatggttaaaat

SEQ ID NO: 847 - DNA, 1628 bp, Aedes aegypti
gaaagctcctggtggaaagatcgggtttcggttcgaggatcgtcactggaaaaaaaaggtggtgcatctgaagaaagcctttcctttcgtttttcgttgatcgttgatatcgatatccagggggagcgaatcggcaagagtcatcgtcatcgctgctagatctggactaaagaagcagcatttgtgtggattctcgacggtttctgaactgcaagtcttgatatcgatttattggttggtttttgaagcgcatcacaatgaaatttaccccgccgccaagttccctccgggggccactcgtcatcccggacaagatcatgatgggcccggggccgtccaactgttcgaaacgtgtcctcgcggcgttgaacaacacctgcctcagcaacttccacgacgagctgttccaggtgatcgacgaagtcaaagacggcctgcggtacattttccaaaccgaaaaccgaaccaccatgtgcatcaccggttcggctcacaccggcatggaagctctgctgtgcaatctactggaagaaggagacatcgtactcatcgccaacaacggtatctgggcagagcgagcgatcaatatggccacccgatatggagcggacgtccgggtattggggggaccggccgacaaacctttctcgatgaccgatttcaaaaaagcgatcgaacaacacaggccgaagtgtctgttcgtagttcatggagactcgtcttctggacttctccaacctctggaaggtctggggaaaatctgccacgactatgactgccttctgctcgtagatgccgtggctagcctttgtggtgtcccgttctacatggacaaatgggagatcgatggcgtctataccgggtcacagaaggtgctgggagccccacctggaataacgcccatttccatcagcccgaaagcattagaagtaattcggtcacgaaaaacgccatccaaagtattctactgggacctgttaatcttgggcaactactggggatgctacgacgagcagaaacgttatcatcacaccgtgccttccaacctgatatttgctctccgggaagccatagcccagatagctgaagaaggtcttgagccagtcattcggcgaagacaggaatgtgccgagcaaatgtatcgcggtctgcaggcaatgggtttagaaatattcgtcaaagatcccgagtaccggttaccgaccgtgacctgtattatgatcccaaagggcgtcaactggtggaaggtctccgaatacgccatgaacaacttttcgctggagatccagggcggatttggcccgacgatgggaattgcgtggcgagctggaatcatgggcgagagttcaacacttcagcgggtaaacttctatctgtatgcgttcaaggaatctctcaaagctacccatccggattacgtatttgagaaaaagaacggccaaacaaatggaacgaagtaacctcgtcgtacagttgaactactgtatgcagaaaaaggataaaatcaatttttaatgttgtttttgaatgatcaaactaaatagaagattaaacaactgatattcaataaatttatcaatatattaattttaatcaaattatcaatttattaattttaatcaaatgat

SEQ ID NO: 848 - DNA, 1332 bp, Aedes aegypti
agacggcgcataataaagaaatcgccaaaaacatttacttgcgatacatgtcaggcacagttttccaaagtaatggaatatttccaacatattagaacgcacggtgcaaagcggtttcagtgtaaaacgtgctcgagatggttttcacgcaaaacagtgtggaaaaggcatgaggcgaaacatttaagtactcccgaaagagtaccgtgtaatctttgtgggaaagagtttagtcacaaacaatctgtggttcggcatataatagaaaagcatcaaaataatcgaagatttgagtgtactatttgtggggttagatttgctcaaaaaacgcatttgcaagctcatcaaagtgtccatagcgaagcacaatactgttgtacaacatgtgatgcaaaattcaaaagctatatatctcacattaattctcacgttttacatttgcgaagacatacaggtgaaagaccctacaaatgtcaagtttgcggcaaagcctttttagctaacataatgctgaaaaatcacatgcttattcatacgggagaaaaaccccacaaatgtgaaacttgcggtagatgtttccgaataaaagcacacttgacaactcactacctaacgcatacacacgagaaaaaattttcatgtcaaatctgttccaacgcgtttgcctcgaaacgtactttgaaatcacacatgaaaactcatctgggtacactaaaaagactaccgtgtaacctatgctcaaaggatttcagctgtaggcaggctttaagacggcatatagtacaaattcatgaagaacggcgtatgttcatgtgtcctatttgtggcaaaagtttcacccaaaaaacacatttacaagctcataaaacgcacaacctaattcataccggagagaagcctcataaatgtgaaacttgcggcaaatgctttagatccagaactcatcttacgacccatcatttaacccatacacaggaaaagaaatttgcatgccagatttgttcgaaagcttttacattgaagacttcacatgttatacatgaacgcgttcatagaggggaaaaaccttaccaatgcaaagtttgcgacaaagcttttccctgtagtaacaacctatcaaggcatatgcgtattcatacaggagaacggccgtacaaatgtgaaacctgcggtaaatgctttcaggaaaaagcaaatctaaagacccataacttaactcatacaaaagaaaagaacttcgtgtgcacggtttgtaacaaaggttttacgctgaaaagtacgttgaagtcacacatgaaacgccactcagtatgtgaagaaggcgatcagtaa

SEQ ID NO: 849 - DNA, 480 bp, Aedes aegypti
gcgtactcttgctcgctcgcacactctttctctcctgctcgctcttctttgcctatccgcttttcctcggctccttcaaattacaacaacaataacataaaaaataccttctcgtctcgaaacgacacacaatgtggaaaattgatcaaagacgatttttcattttcatcttctttcgtcatcaacgcgaaaatacacaaattatgcgttcacacacacgttcaccgacattccccgaaaaagagaaactctagaactgaagttgctgcgtgctgcggcttgcacgggaaaatcactcttgatattctcgttggaccattcttcgctttgactaattcctttcggtcgttccttctcataaatcatttgcacctcgagcgatcaacatctacagagaggcatgcaagggtgctcactttcccatctcaaacgcaccaccatccggagaaagagcaaagtagcactttgatttttcagtaa

SEQ ID NO: 850 - DNA, 666 bp, Aedes aegypti
atgtccgataaggtcttcccgaacgatgaccagagtgattccggcagggccgatgttcttctgggcgcaaccaaagataacgccgaacttcttcacgtcaactggtctggacatgatgttggaagacatatccaccaccagagggaccccattcgtgtccggagcggtgttgaactccacgccctcgatggtttcgttgtcacagtagtagacgtacgaagccttcgggtccagtttccactccttctgatcgggaacacgtgtgaacttgtctggcttggtaacaacttggttcacctttccgtattttgcggcttccttagccgccttggccgaccaagatccagtcaccacgtagtcagccgttccggttcgaccgatcaagttcatggcaacggcggcgaacaatccagtgccaccgccttgcatcagcagaactttgtagttgtcgggaaccttgagaagttcccgagccaagtcaaccgtatcgttgtgcagtttcatgtacgaagatccccgatgggacatctccatcacactcattccgctcgatccctgctcgacgagttctttctggacctcgagcaggacttcgcggggcaacttggccggaccggctccaaaattaatcaccattatgcattagatcaaccgcttctcgattaa

SEQ ID NO: 851 - DNA, 1281 bp, Aedes aegypti
tttatcgtgtttcctcaagcaaaattcgggctgcggtgaggaaagaaaaaaatcctccattgatagtgagagtgagagcgcgttggaaaccgtcaagtgttggtggcgagtgaaaaaaacgcgaagaaaattcgaaatcgcgtgaagattttgtggtgttgaaaaatttctatctaaaaggtggtgcatttcggaatccgtgacggaacaatcgtgtccgctgactacccgtgtcgtgcagtgtgtgaggaaacgcaggagtttgggttacccgggggaaatccggaaggacaacgaagaacacaagacttatttgctgatcaagagtattatcatttacacacaccccgaaacaaggaccccgaaaagtttttgcttccgagcggattgtccgctcttgcaagcggaagggcgacggaatcgtgtaaacatcagtcggacagcacatcggaagctcgaaaatggacaagaggaaactatccacggccggggatacgttataccaaactctaggtttgccaaaaaccgccacagcagacgacatcaagaaaacgtacaggaaacttgccctcaaataccaccccgataagaaccccaacaatccagatgcagcggaaaagttcaaagaggtaaaccgggcacattccatcctcagcgatcttaccaaacggaacatctacgacaactacggttccctggggctgtacattgccgaacaattcggcgaagagaatgtcaacgcatacttcatggtcacgtccccgacgtgcaaggcaatcttcctgatttgcggcattctgaccggttgctactgttgctgctgttgttgttgctgctgtaacttctgctgtggcaagtacaagccaccgcacccggcggaccagtccggagattaccaccatctgcacagggacggtggtgccagtagtagtgccaacgcaggcgaacgaccaatagttactgaacagcccacgcgaaacacggaaacggtttaagtttgagagaccatcagtatttgagcgaaaagaaagataatgacgatggacggaagaaaaccaagccttatttttgctaaccaaagtagagtgggaagacactgaaatagatgccataaactaattacgtaatcttgttttgaaaaatgatagcgtaacaccgaaagggcacttagttgtcgtttattttagtctcttattgcgtactttaaagttttttttttgttcttgaatatgtgaagaggtctcaagctgttcgaaaacggatcaataaatttgttaatcg

SEQ ID NO: 852 - DNA, 3383 bp, Aedes aegypti
catagtgctctttgagaatttcaccaataaaatcatcacatggtgaggcaatgtggtgatttctgcggtagcacgtggccatgtcattttggtgagcttcgcaagatgatcacaatagttgaatgaaacgcacagtactgagatccatttctccagcacctcctcaatgcagcactacctaatgtaaaacgcgttcaatcattgccataatcagaactcgtccgattggtggcgaaggtgtcccttccaagtccgcggtcataatcctaccacgcatttgaatgaatcaaatagctgcgatgacgattgtctcaaccgacacttgatccacgtgggcgacgccaaaacaaaacagtgattcactttgtcgtcgctgttgtctcatttgagtccatttatagagcaaagttctcaacaaccatcagtagtagtaggctttggttctgaagcaatgaggtaatgcgaccgcgcttctagaagctttacagttgaaccataagttgaacagtttttagtcgggtcacccttttggtgagagcattccattttttgagaatttcgctgtgtgcggagcgcgcgctctcgcgctcacatccattcaactgagtccattcatcgagaaccattcaaataaaagcgatcgaatcgcgcggagagccattcagtcgcagaagagagtttgccgtatcgttatcctacagtaagaccaaccagttcagtttatacaagtgaacgtcaaacttttgttgtccctcagtacagagtgtgaatctggtgcaataaaaaaaaaacgcaatcaatcggtacaacgaaaaagggaaggaaagtgtgaccttgccccttgacaaagaagctcgcttttgattacgattgctagtttgctcgtttgagagtttggtgaaagtgagagtcttactcctcgcgaaaacgaaagtgattgatttttgacagtgcgcccaatcgtcgaacgattgtgtttattgtgtgttatcacagcctactacaacaaacccggtgaaaaatggccgacagtgcaaacaagcgcaacatcccgatcaagctcggtgacttcagcgtgatcgatacggagtttgccagcatccgcgagcgcttcgactccgagatgcgaaagatggaggaggagatgtccaaatttagatcggaactgatgaaccgcgagtccaactttttcgagaccacctcgagtttttccaccaaaaagacggcgacgtccagcagcaccaccacatcgaatgcagcctcggccctgcgaccacagaccggcacaagcaccagcagcagcagcacacaggttcaggacatcaactctccgctgatacaggaggatggcgataacaaagttctgaagctgcgcttcgacgtcagtcagtatgccccagaggaaattgtcgtcaagactgtggacaacaagctgctggtccacgccaagcacgaggaaaagtccgacaccaagtccgtctacagggagtacaatcgggagttcctgctcccgaagggctgcaacccggagctgatcaagtcctccttgagcaaggacggagtactaacggtggacgctccactaccacagcaggctctgaccgccggcgaaaccatgattccaattggccatcactaaacccctaaatagagtttcatccataaatctttatcaatgtgtgtactcgggaaagctgcgcgtggtttataactcacacacatcgctttcatcaagccataattaccagccgatacccaattattagagacatcaccagtgagagagggcgagaagagatacataattcactaaaaaaaagtagacgtgctttttcaacgatatttgtttcgatattagatcttttacgagagcaatggctgcaatggccaccaatttagaaaactaagcaagcatcggatccaattaagaaggaaagttttgaactggaacatcgccaacgctacggctagttgttaggcccttataattcaattcatctatctatttttataacaaaaaacggaagatatttcaaacttgtgataaccctctgaattaaaaccaacggtcatcgcacacacctaattaattaatattctttccgattgttaaccacacgcatcaccatcgaaaaaccatcgaatcaactcagtaggcggtgcactctaaccgtgccccacagcctacttacttacttacgaaccagtataacacaaaatgaaccgaggcctttatgagtttctgggattaattacctttttctactgaactcacttgagattttgtaacgggaatattttttactcgaaaaacatcagaaaaatgtcactgcaatttagaggcagctacaatgacacagtttggaacaacgtcaaagcaaatattgggcaaagggctttcgaagaacaatgttagtaaaagaaagacgctacttagaagcaagaacaacacgagtcgactatcacttaatattacggcaactacctactacaacagcaacaacagcagcatgcaacaaccgtttgtgtatttgtgctttatttattttatataacgtaaattcggagaacggtttaaggaattaaatcaggacttgactaggataggagccggtttttctctcttattttgttttggaaagaaatcttccctgtaaaacgtgttcgctaacctatggtttgaaaccttaatcgatggatgcaaattcgggttttgattatttgtcaagttggatgacttactcaaatttgttcatattgttcaaacatgtttttgattaaaagctactttttttggattcgactcatcaacaaggttaaacctccttcaacggagcccaggtgaaatccgcctggtaggtgtagtagcacaaccagtagagcacgttgaaaaaggtgaaggacgctgggaagagcaccctggcggcttgatcgatcagcgatacgctgttgacgtgacggctggcgcctcctggagaggaaaggagaacattttaatcattgtttttgttattacacttatgtttatggtttgaaacaaatatcattgaatatcatctcctcgatgttaccgttgataactttttctgttttcccctaagcgtcaaaaattacttgctcattagcgcctcttggtggcagaaaatcgaatgacagcgctcaacttactaaacatctactgttttcattgtaatagaaataatgttgtactttctaaatagtcccaggatcccgaggtaatcggcaaatcaaaaaatggcttgctcactagtgccaggcggaattccgtatctaagggaacaaattatctaaaaaataattattgaagacattccttgaacaggggttgaattctgagcaaattgagagtatctcttacttat

SEQ ID NO: 853 - DNA, 597 bp, Aedes aegypti
cttgactaacgacatcacgtgtaatttaaatattggacccaacacaaatcagtcaacaatccaccgtggtcacgatcagctcgttgttccgaatattcattacacacgatcaagccggcaatatgagatcaatttgcctaattattgtctgcggtttcattatcagctgtcaaggttatacagccattttccccaattccgaaaacaaagattttcccggtgaatgctacgatactgagaccaaaattcacttcaaacccggcgaaaaccgacagcgacccggaatgtgtgaagaaatgtcatgtggaacggatttctcaatccactttttcgggtgtggactggctattttagacgatgacccagactgcgagccaattgtacaggacttcactaaggactacccacaatgctgccataagtacaaatgcgtacgcaatggagaagttaattatatttaggaaaactgtaataaacttgtgatttgaaatagttaaacaacttaaaactttaattataaatgtaagcagttaattatatatttacaacaataaacatatatttaaaagtgagctctttctattatcatttttactt

SEQ ID NO: 854 - DNA, 1752 bp, Aedes aegypti
cttatcgctcatgacgggggaattcccttagacgtgtgttgcacctattagcagagacgagattccgtttgcgagatcatttccagtttaggctccggttagatagaacggtttatttttccagtgtcgaaaaatggcaaaagccaccatgctgcatattttgtggatttggtccgtcgtgggattggcaaacgcagaggagatggtcaactgtttcggcaatggtcaatgcaatgattttcatgcgattgttcaaggaccacaggatgttgaagcagttatccgaacttatagttactctaaaaaagccgacttccacggtaatctgttgacacggtttcttcccaatgtacagaaaccaacagtgcaatgggaaaagttgaatatttcctataacttgttggaaagtgatatttttgaccagattaatagtcctaagctgaaatatgttgatattacctataatcagctaacgacggttacagtaccagcttcagttattgaatttattgcagagcgaaataagttaaccagcatcacaatcaaatcaaccagcctaaaaaggcttattttaccaaaaaacaaattagactcattcatgggactcaataaccttcgtctgttacaagaattggacttatcttgtaatcaactcgaaactctcaatataaacgaactatcgtcaatgagggatctcaaatccttgagcttagcaaataatcatatatcatttattgatgggagcacaagccagctttcatcactgaaatatctcgatttgtccaacaacttattgactatggtcgatgaagcattcaaaagttttccaaatttgaacaatctgtatctacaaaacaataaaatagtcatgtggatcaaggaaatgcctatttctaggactctacaagaggtcaatatccaaaataacgattggtactgtagcaatctggaaatgctgaaatcaaaactcggcaatacaatggttcgaggtccagagattgcatgttccccggtggagtctccctatgccaatcgagtgatcaagtatcgaaaaaaaaaattcaacgctctcatggagggggcagctcaacgagtaggcaatataacgtgtgattccttcaagcctaacccatgcgatggagatgacaaccgggttaaggaagtggccggatctgcaatcagcaatgccggtgatcttgctcaaagcagcgtccagcttcttcagagtgacttggcaaagcatatgaatattttgagagctattcaggaccagattgctgaagcccagcagataaacgatcagatgacgaatgagaacaatgatttggccaactacatcagggagcaatataacgtcgctgggcttagtggacatatcgatccagttgttcagttcaataagttattcgaacactacgagagtaataacgctaaattgagggccgaaataagagctgaagagcaaaacaatttggatgtgttggacgaaataaacgttatagataacgaaatggaagataagaaatacgaggaaagtcagttgcttgaggagttgaatgcacgcaatagcaccgttattggctatcaaaaaagaatcgcccaactgcaaaagcaacttagccaacagtaaagtgaagagaaaggcgacatgaatattgaaatgttatatcaaatcgaattgttacctgcaactttacgcaataaataatgtttcaatagcggtctacttttattgtacaaaagtctaggaat

SEQ ID NO: 855 - DNA, 1881 bp, Aedes aegypti
atgttgaataatcaacttggatggaatggactgataattattcaacttttacaaatatattcttccagtacccagcaacgacatatctgcaccatatcaacggaattctacgattgccagatcgaaggagtacacattaaagatggagaaattcatgagttcagacctgaaccacacaagcatatcacatttagggattctgttttacggtatctgccaaaatcattgattgatgcattcccaaacatgacactgctaaacttaaaccaactcaagatcactagcatagaaaataatgcttttcataatgctggagaactggagcatttatatcttcaagaaaaccgtttgaaggatttccctagaaaagtgctcgatggtgcacgtaaattgaaaacattagttttatccgacaactcaatagaaactatgccgtataatttcaagaacaataataatttagacaatctttatataaataataataatcttaatttactgccatcatttgaatacataacacaattacaaaactttagcgcatcacgtaatgaacttggacaagttgatagtaaacaattcatgaagcaaaataaaatcgaaaacatcgatctatcacacaataaattggaaaaactgaatctacgactaacatctcgagttcttcgaattgttgatattagtaacaataaattgactcagctggatataacgttgcatatggaaaatctgaatgttgaaaataatgaattgtcatcatttctagtaggaaatgagtgcttgctgaaatcattgaaaatgtctaacaatacactcgaatcacaacctgttcttttaaattgtcaattattagaattcttagatttatccaaaaattcattgttatcttttcaatatccagaaactttaagtagactacgatatattaatctcacacgcaacaacttatttgaattttcaacaccaaaaataaataagaacttcgaacttgttacgctggatttgtctcataaccaactgtcttatttatattcaatgcagccatttaaacatttgaaagatttaaaactaaacgataacgtattcattgcgatccagaagaacagcttaccaaaatcattaacttttttgtatgtagcaaataatgaatggaaatgtgatgatgtgcctaattggaagagactggctcaagatgcaaatgatgattgtaaaaatggatttacgcaaacggaaggtatttgttgcaagaactacaaaaaagctttcaatgatgtactgaacgaaatgatgagagaagcctattttcatgaacgagcaaaccaaaatgaattgaaagggaagtgtacatcttatcaaccaattagaacgaatgatgacgacttggagcgcattcggcaattagctgctagcacagataaaaataaagcaaaaatttacgaacagttagcaaacactaaaaattcgatagcgtctagtaatgccaatttaaacaatcttaaacaaaatcaggctcagtctagcagtgtcaaacgatctatggcaatgaagatcgaagagaagcgtcaaatgtatcatgtcacaaaagaaggattattgtccgacaagcaaatgctaggcagagtggtcgactatgttcaagaaagagacgcattttccaaaaccacgttgaatggacgaaaggaagacacccaaaacactaaaaggttgttagaacaaaagaagctagagaacaatcaattagccgctaatattgaaaatataaataacagttctttcgagtttaaaaataaggaaaaagaattgaagaaacagattgagagacttatgaaagaaatcaacaggaattctccttcaatccatggaaagacaggtagatcataa

SEQ ID NO: 856 - DNA, 3443 bp, Aedes aegypti
acttgtagtgcagctgtggtttcgagcgggtcgcactttgagtaactctccgtcttcttaggagttcagagttctcttgggtatttaattgtcctgtagagactgattggtgaactaaacggtggtcagcagttgttgagtgatttcgtggtatagccgaagtgattgtccgaaaaaatgtccaaaccacagtccgatgagcagaagaggaagcagatcagtgtccgcggtatttcggtactggaggatgtgaacgagatcaagagaggcttcaaccgccatctccactacaccttggtcaaggatcgtaatgtggccacggtgcgagattactactttgccttggcccacaccgtaaaagatcatctggtgtcacgctggatccgaactcagcagcattactatgaaaacgatcccaagcgcgtctactacctgtcgctggagtactacatgggtcgttcgctgcagaacaccatgatcaacttgggcatccaaacgtcctgcgatgaagccatgtaccagctgggtctggacatcgaagagctggaggagctggaagaggatgccggtttgggtaacggaggtctcggccgtttggcggcttgcttcctcgattcgatggcaacgctgggaatgcctgcctacggttatggtatccgctatgaatacggtatcttcgcccagaagatcaagaatggtgagcagattgaggaacccgatgattggctgcgttacggaaacccatgggagaaggctcgtccggagtacatgattccaatccatttctatggacgtgtgatcgataccgccgaaggtaagaagtgggtcgacacccaaaccgtgtttgccatgccttacgataatcctgtgcctggatatggcaacaacttcgtgaatactcttcgcctgtggtcggccaagtctcccattgacttcaatctgaagttcttcaacgatggtgactacattcaagccgtgttggatcgtaacttggctgaaaacatttcccgtgttctgtacccgaacgataacttcttcgagggtaaggaattgcgtctgaagcaggaatacttcatgtgcgctgccaccctgcaagatatcgttcgccgttacaagtcctccaagttcggttcccgtgatgccgttcgcacatcgttcgaagacttcccgagcaaggtcgccattcagctgaacgatactcatccgtcgttggccattcctgagttgatgagaattctagtcgacgatgaaaagctttcctgggacaaggcttgggatattgtagtgcgcacttgtgcctacacaaaccacaccgtgcttccggaagctctggagcgttggccagtgtcgctcctgcagtccattctgcctcgccatcttgagattatctaccacattaactttttgcatttacaagaagttgagaagcgttatcctggagactttggcaagatgcgttctctttcgctggttgaagaggatggtgataagcgcatcaacatggccaatctttctattgttggttcgcatgctgtgaatggtgtcgctgccatccactcggaaatcatcaaaaaagacatcttcaaggacttctacgcaatgactccagagaagttccagaacaagaccaacggtattactccacgtcgttggctgcttctgtgcaacccaggtctgtcggatcttattgcggataagattggagatgaatggccagcgcatcttgatcagctgaccaggctgaaggcatttgccaaggatccaacattccagcgagatgtagccaaggtcaagcaagaaaacaaactgaagctcgctcagctattggaaaaggattacggcgtcaagatcaatgctgcctcgatgttcgatatccaggttaagcgtatccatgagtacaaacgtcagctactgaactgcttgcacatcatcaccttgtacaaccgcatcaagcgtgacccaacagccaacttcactccacgtactatcatgatcggaggaaaggctgcccctggatactatattgccaaacaaatcatcaaactgatctgtgccgttggcaatgtcgtcaataatgatcctattgttggcgataagctgaaggttatcttcctggagaactatcgagtcacgttggctgaaaagatcatgccagctgctgatctgtctgaacagatctccactgctggtactgaagcctccggaactggaaacatgaagttcatgttgaacggtgccttaaccatcggtaccctggatggtgccaacgttgaaatggccgaagaaatgggcaacgataatatcttcatcttcggcatgactgtcgatgaagtcgaagacctgaagcgacgtggatacaacgcctacgactactacaactccaacccagatatcaagcagtgcgttgatcaaatccagaacggattcttcagcccaggaaatcctcatgaattcacagacatcgccaacgtgctgatgaagtacgatcgctactatctatttgctgattacgaagcgtacatcaaggcacaagatatggtttccgccacttatcagaatcaatcgaaatggcttgaaatgtccatcaacaacattgcatccagcggaaagttctccagcgatcgcaccatcgccgaatacggtcgcgaaatctggggcattgaaccaacgtgggacaagctgcccaacccatccgaagcaccccacaataagtaaagcaccttcccgttggagtcggtgtacgagcgaaacacgtgcagcaaataggtacactgccactgagcaaaatcggttactgtcacagcagaatgggaagaaaaatatgcttagaagcgttggcgaaaactattgagactttgattcactttcctatcagtgtatggtttgtctgcgcaaagaacggacttttcgtctctcaacgtttagtgttaggaatgcaagcaatcatttactcgaaacggtttgcttgaccgcaaaatggatggaacgaggagtaggcaacaaatgaaacaaaacctagttaaaaataaatttcaaattgtcaaataaatactgttatcgatgtgtgtcgttagatgtaatttgcatggttaaataaaaatagaacacaacacgatccacaagcatgcaaacaacacaactgtgtactcatcaaatcaaacattttaattagggtgccatcaattagatattatgcttttcatttatctatagcttagcaacaacggggaaagagacagcaagtagaacaaatgatattagtaactaatcgaagcaaaaaatgtagcggctaaaattgtacatcatcaagttcagcagatggagcaaattagaaacaaaattaaactacctaacaaagattctgttgcaaaatttgagcatcttattattgttattaatatatttccttttattttttatatgaaataaacttattaccttgg

SEQ ID NO: 857 - DNA, 801 bp, Aedes aegypti
atgatccccataaaggccgctctcattgacctgagtggaacgcttcacgtcgaagatcaacctaccgatggtgctgtagaagctcttaaacgactgcgacaactgggagtttcggtgaaattcgtaacgaacacaacgaaggaaagcgtttcatctctatacgctcgactggtcaagattggattccagctggaacaaaccgagatctacagttcgctgaccgccgcctcccgctttgtgcagagtaacaacctcaatccgtattacatcctaacagacgacgcgaggaaagatttccctgcaaacgactccgccaatgaatacgactcggttgtggtcggattggcccctgagcgattctcgtacgagtaccttaatgaggccttcaggattttgcacaacagcaaggggacagcccggttggtggccattcacgaaggaaagttttacaaaacgaaagacgggattagcctaggtcctggatgtttcgtgaagggcttggagtacagcaccgggttgaaaagtgagtgcattggaaagccgaatgcttacttctttcgttcagctatgccggacgggttggaaccagaggagtgtgtaatgatcggcgatgacccgaacgatgactgcctaggagccatggcaataggaatgagaggattcctagtggaaacggggaaatttcaacccgagttgtacgataaggatgctcttccgaaagttagtggaatcttcaaaaactttagtgccgttgtagaacatataagtaaaacgttaaatcaataaagggtcgccctaagt

SEQ ID NO: 858 - DNA, 1926 bp, Aedes aegypti
atgtcttcaatgacaagccgcatagctcagccagttaggaaactgtcgaaaacaagccttggccatggtctaaatgagaatcgtcgctcagcttccaacgatcggctcagtgcccattctaatgtactcgtccagcaaactccggcaactgcccgaaaattgcgcagtcagagcgcgactccagcgagtcgaaccccccttagaagcaatgaaaatattcccatcccttctacggtcgagaaggataagccaccgttagaaaaccgcgaatggatgatggcccaatgtgaacgaatttgtgactacctggaaacgatacccgatttgccacaagagttcgtcgagcggcgaaatttgcgggccatgtctacgaaacagttcctggttatcatgaatcatcttttccggcaaatcggaggcaatcgctataaattgggtacaaatttcatcgacgacatcatgaaaacgatgatagaattggagtatccttacacaatcaacaagtcgatgcttaagacgccaaacgttccacattcagtcaaccacattatagtcatgataggatggctggtacagttggtgcctccgatcaaccatgagatttcacatcttaaacgcgacgttgatcttgtagatgagtttccaaactgtgagttccaaaactttttctttgcgaaagttcaggatggtttcagtgtatggaatttacagaaaatggacgaatatggagcagtcgttgaagagctgactgataaattggtggaagcacgaaccaatggtttgaatcagcgccaagtgcaagatagaatcgggcaactggaacaagaatatcaagatttaaataacagaacagttcaacagggtcgcgagcaaagtatggatgcttttgttgaaaccattcaagaccaacaagagctaaggaaaaagctacaagaagaagttaagaccattcaaaaacaggctaataagcttgataaagaatattatttgagacaagacgactattacgctcgtgaaaaaagtttagaagagttaaagcagcagattaaaattcaacaggttgatgccaccgaaagagacgaaataatcaacactatatcaacgaataagaatctcctaacagcaaagaggttgacagtgagtaacctggaacagtcttcttatgaccatcaaattgtcgtgtcccgcctgataaaacaaaagtacaacgtaatatctaatcttaacaccagtttacataaaatggcgaataccctgaagccactaatcaactttgaagctccgatgctagatttgaaaactgaaaattatgaagagctatatctgaatatacagaacattaaaacgcagcttcagcgagtactttccgagcaagcttcaatatactcacaactcaacgaagagcaatgcacactcgaacgacaattatccgacctgcaaatccggtacacctcagttgaaaaatctcttcaagagacaataactcgttacgagcaactgaaaaagcaacgtggagaactgatcgaccagctaaataccatttctgccgagaatgcacaggccagccaacggaaggatgacgaaaggcttcagagaacccgagagatccaagagcttcaggaacgatgcgagcaaaacaaaaaagctatcgagaagctgacgatagagaagcagaaattgatggcacaaaacttggaggaatgccatcacattttgacggagaagaaacggatacagaaggaagtgacggaaaagattgaagcaatggaagccgtaattgcagacattgaacgggaactgggacccctcgactgatgtgagttttggggataacaggtttgttttgtgtttcagtaaatttttcgcttttaattcgtttttaaaattgtggttcataatgtgtctaatatatcacctccactttgg

SEQ ID NO: 859 - DNA, 2123 bp, Aedes aegypti
atgtacgagattttgtcctgtgccaagaacacccagttgcattcgttcccttcgctggaagtcctcggccaaggtgcccatgccaacgatggcaaggacagcaacgaaagtgtttgccagttctttccccgcactaagctgttcctccgaaccaaccggaactggggcgtggaattattgcggataaaggaaatcgccggaaagccaacaatggcccacgtccagaagcgcacaattgacaatctgtattgtgtggcctgtccgaaaacggccgtcgaggaagtggccgtgggcatgacgtccggctcgatccggctgatgaacctcaaaaatacgacggccggtttgaaacggttggacacggaccgcctcaccaatggggtgattttcatggatttcagcgccaacgatgactttctggcggccgtttatgaaaacggaaccgtgaacctgtacgggactaaaacgaacagccgcgtcggatcaatgacgttcgacaagcacacaaccaaagttcgtttccatcctctgaagcggttcttactgtcggtcgcctcgtacaaaggatcggtcatgctctacgacacccagtccaagaaaatcgttttcaatcaaacagaagcccattcggaaccgtgtcgagatattgccatgaccgccagcaattcagaccttctgttcacagtgggatacgacaacctgatcaacatatacgacacacgcaagaagcaatcggccacgaaaatccgttccaattacccgttcgaatcgctggacgtttcggaatgcggcggatatttcgccgtggggaacctcaagggacaaatttattgttacgacatgcgtagtttgggggagcctttgaaaacagctaaagttcatgatagcagagtcaacagcatatcatttgttccaaaaactgcggaaaaaggtggacatcgagtgagcttcgatcccagacaagttccgaataccgcagagataacagtcgcaactcactcggcatcgacgaccgcagtggtcaacgaatcgcccgttcctccgaagcccgatcgcgatagtttcatgaacgacatcgacgcctttatgcagagacgagactcgatggattgtctggctaggctcagcacttcatcgcggatgagcaccgagtctcggggaagtctcaacatggccggtaacaatctgatgggctatttggacgatatctccgatagcaatttcgacccggaccagctggaggaagggcccgccgaagaaagctttgtgaatgttaatcgactcatcaagagaactagcattaaaaagcagacgtctgttgatcggacgcaaaaatctgcgatcaatttggagaacatccgagaggaaccggatatggacggcactcgggcgttgacggaaatctcaaccgattccaatgtcgagtcccagcaaaggccgggaagtggtggaagtacaaagagatcctccgttcggcgctctgcagatgcagaaaataaagaaaatcaagccaccgcggtagacgaccccactccaaacccggatccggcccacaaaacatcccagacaacaaaagcagagtcggaaatgtcgccgaccgtccaggccgctttccgggagcttaagctagaaatatccaacatgcgtcaggagttgcgagaggagatgaaggagcacttctttcagaatcaggtcgatcggaaatatacggccatggccacgcgcagtcaaatttggatgggatcgttcaatctgtggaaggagtcacagaagcagctggaacggatcgatgaggttacacaaaccggatttgggctgctgttgaccaacgatgagtttacccagcagtttatgcgcctccagcgagagaatgaagaactgaaaaggcgaatagccgaaatggagcagggtggagggaaaaagtgaatgatccgtggttgatgagaattaagttttactttaaagattacataaaacaaaaaaaaccctttacatatcaaattgaaattttgaatactagaaaaaatgagaaaatgtaatatttatgtcttttggaagctgatgaagaaatttcgtgttgtttaatgcttacgccgaataaaaaaatgaattatcgaattgtg

SEQ ID NO: 860 - DNA, 2024 bp, Aedes aegypti
ttcagacgctggttccactccgtgatgtaacacacgtttagtatcggttcgcaaccataacgaaagtgaaaaacaaaacttctgccctgtagaaccggtagtagctacttccagtcccagtgtgtgggacaatttacaacccgaaattgagccggttagccataaatctgagcttttaatcgcgaacgcgcatcgtcgccggcgtccgaaaactaaaatctcgtcgtcgcaaatcgcatcggattcgtgctggtgaccttcgtcaaatagtcaccgaattgtgtaagcatcgatggggacccgattgcagcttggttggttcagatcttctggagcagttcttgtggcggtggttttctgcttagtaaccgccggttcgctcgttgcctcacaaggaattgaagccattccacccaagctatatgcaaagctcccttccagtaatgtaccactcctttgccgtagtaacaaacccgccaccagctgcagcgttagaattcccggctattccaacacctatgacgtccacgagcttcccaatgggatcgaatactacggcgaaagcttacagcgtggcgagtgcgggatcatgttcaactcgcttaagtccactaacttgggcaaattccagtgtaacatgaccatcgacggagaggtattccaacagtcgatcgttatcgaagccgccttgagtccggaaccaactgatctggctattggcgaaggaacaatcctcgaacagggagcgtttgcaccgaatcaaacattgcgggtgacttgcagttccaacaatgccaatcccgcttccaatctgacgtggctgttggacgaagagcctattgacccgtctaaccttggccccttggaaaccagcgaaaacgttgactcccgaggaaggaagttagtatcggtatcgcagcagttgaactactttatcacactgaaagactatgggaagaagatcatttgtcgggcggagcatttcgcgattcagaaaggcttcttccgaggattcctgccgctcaatttccgatttcaacccgagccagtgccaacgatcaatatcggtgaaacgatgatcaacgtgacaatcaaagccaatccacgccccaccacgtcttggaagataaacgacatgacggtcgttgaaggtcaaagcttgggaccgtaccaagcctacatacccaaagatttgggtttcggcaactacttggtcctgctgaggatcaacgagccaacgaaccaatcggagctgatcgagctcaccgccagcaacgagctgggatctcgaggatacgtgatcagagcgcagaagatcgaaccaacggcgcccggacgggggaccaccaccttctggctcatcagtatatggacttatctgtgctctgtgatagtgacctgtgtgttgagaatgccatgagctaaaacagttccttcatcttaagccgcgagatgtttttcccttctgcgggcgttcgagatcggttttgctcattggttgagagctcaacccatgagcaaaactagactccttacgccgcagggggattcagtattaattatagtgtttcctacccgagagttttgtccgaagagtggtttgcgtcgagaaatgatctcgaatttaacgaagaacggcacttactttaattatcgaaggtaaacgtgatctctataaaggagatttgaatttatttatcaataccttcgatttattgaatatttaataaaaccaaattgcatttaaatcgccatgattacccaaattttcctaaagagtcggaccagattcgaaaatcgggctttggaaacactacttgtaaaaataacttcatgagatatgaatgtcaacaagaatgttacttcatcgtttatacattttcttcattttttttctagaaacagtcataagtgaacgttagtgtaggatatttatttattgaatatagagtataacagtgtcgacaaatccgaggcagccaataaagatttcagttgcttttcaaacggggaaagagcaatgc

SEQ ID NO: 861 - DNA, 1597 bp, Aedes aegypti
ttttgaaacgctcgccccgcagttcattcataaaacaaaccaaaatacgcaaaacgcgacacgcaaaaacctaacctcagcgcctcgagaggacggacggacattgtttttattattgtccttgctttcgctgaattcggtcgagtcaaaggaacggttccttgtatcgaaaggttctttagtgcgtatttgcacgtcgtttaaagtggttatttgtgcagtgattattcgaagttaaataaagttacacgtgtgtcaattcggttgaaaaacggtgaatttagtgctttttatgctcaacgcaagcgaacaaacattcaagtgcttaaatcaagtcgaagccattttctggtgtgcaatcgtgaacagtttttcgtccttaaatttgacgacgcgtccgtgtcttaaaattcgtttcagacaaaatgttccgtgttccatcaaagttgtccactttggcagctggcagctgtttgtccaagcgtggattggtagatttggccaagttgagctccctggttgacattaaaccggaagtccgtgatgccctgaccaaggcacctcaatcggtagtggccctcgagtccaccatcatcacccacggtatgccctatccgcagaatcttgagacggccctcgaagtggagcagatcgttcgccaaaagggcgccatcccggccaccatcggcgttgtcaacggccgcgtcaaggtcggcgtcacttccgacgagctgaaggtgttggctcgcgtcgacaaagagagcaccttgaagacatcgcgccgtgatctggcttatgtggtgagccgcaagctcaacggtggcacaaccgtcgccggaaccctggtggtagccagcatggtcggaataagaattttcgccactggtggagtcggtggtgttcaccgcggtggagaacacagcctggacatttccgccgatctgatcgagctcggtcgctcgccagtcgccgtcgtttccagcggcgtcaagtccattctggacattccgagaactttggagtatttggaaacccaaggtgtctgcgttgcgtcctaccaatgcccggacatggaattcccggccttctacttccccaccagtggatgcaaggcgaactgcaacctgaacaacccggttgaagccgccgagctgctcagcgccaacaattccctgggtttgcagtccggattcctgatcggcgtaccactgcccgaggagcacgcaatcgaccgcaaactgattgaggatgccaccgagcaggccctgtccgatgctggccagaatgccgtcggcggaaaggaaatgactccgttcgttttggcagctatctcactgcacactaagggaagaagccttgaatcgaacattgccctggtaaagaacaacgcgagcgtcgcggcggaaatcgcggtcgagttggcacgtttggagaatggcgggggcgctgccaagtccggcagccaacgagcaccggtcagttaaatatcttgtctagcaataatcattctccttgctgtgtacacatctaatttatctacctcatagtaatgcaaatgtaatgtgattaaagtaatgtgtttagcgatagtaatcgg

SEQ ID NO: 862 - DNA, 3248 bp, Aedes aegypti
ctgagcaagcgtgctagctactatcgtttgttgtgttacattttggtatgcgcttgtctgtgactttcaatgtagctccgtcggtgtctaccgcttctgcccaactgttggcagtatattggccaataactggtacatgtgttgcaagtacttatcagtcacgtggacacaactgtcttgaactcttatctaatgatacaaactggttccacgtctggtcgacattcggtacaccgacggtaccaacaccatcaaaagctggtccccgtatgaaaagatgcacttggggagcagaagaaatggtctctcgaagtcccatgaagaccagtattcctttagctcttgtcgtgtcgtggcgtggcgctatcgtggagttcgtctggccgaaaaagaaataaaatcttcccctactgccaggcgtgaaaggtgtgcgggcgtgttcggagtgtgacaaatattaatccaacgcgtttgatggtgatattgctggagtgattaaccattgaaacttaaaactcttggagtgaaattggagcatagtcagctatcggaaggcactgcggttgcaagacatcccggaacggtttaatctgtgtggcagtacccgaggacgatcttcttgagtaaggatgagtcggcgcttttcgcgagcagagtccagctcggacctgctggctttcctggaccgtggccactctgcgaatactgaaaatcgatggacttttgaaattgcatgggaagtcgccaataaggtgggtggaatctacaccgttattcgctccaaagcatttgtgtcgacggaagaacttggcgatcagtattgcctgattgggccatacaaagaagcatctgcccggacggaagttgaagcatgtgagtttccgaacaatgggcccctgtatggagcagtgtcagcaatgcgaaatcaaggctacaaggtacactgcgggcggtggctagtcgatggaaaccctcaaatcattctgttcgacgttggatcggcggcctggaaaatggatggctacaagcaggaactgtgggaatcatcaaacgttggaataccgcatttagacgttgagagcaatgatgccgttattcttggctatactatcgccacctttattgccgagttcaaacgttgcgctgaacaatactcgcacgacaatgaatacggaccaccgcgtattgtagcccatttccatgagtggcaggccggcgttggtctaattgctctgcgaacgcgccacgtagatgtcgccactgtgttcacaactcacgctactttgttgggtcggtatctgtgtgctggtaatacggacttttacaataatctagacaaattccctgtcgatgaggaagccggaaaacgacagatttatcatcgttattgtcttgaacgtgctgctactcatctctgtcatgtgttcactactgtctcggaaattaccggttatgagtcggaacatttgctgaagcgaaaacctgatattatcacgcccaacgggttgaacgtgaaaaagttttctgctatccacgaattccagaacctacacgccatggcaaaggaaaagatccatgagtttaccagaggccatttctacggtcacttcaactttgatttggagaagactttgtacatgtttattgccggtcgctatgagttctcgaacaagggtgctgacatctttatcgagtccctggctcgattgaatcacttgttgaaatcacacaatccggatgtaaccgtagtggcattcttaattttccctgccaagaccaacaacttcaacgtagagtcacttcgtggacatgccgttaccaagcagctacgcgaaactcttaacaccattcagcagcagataggaaagcgaatgtatgacacttgcctgaaaggacatctgcctgatggaggcgaaattttaactaaggaagacatggtcaagatcaaacggtgtttgtacgctctgcagcgcgatggaaatccaccggtaaccactcacaacgtcgtcgatgactggaatgatcccgtcctggagtcagtacgacggtgccatctgttcaacacgaaatatgatcgtgttaaaatagttttccaccctgagtttttgaactccaccaatccattgtttggactggattacgaagagtttgttcgcggttgccatttgggcgtatttccctcatactacgaaccatggggctacacaccagccgagtgtaccgtgatgggaattccaagtgttacaactaacctctctgggttcggttgtttcatgcaggagcacattgccgaccctaagtcgtatggtatttacattgtggatcgacgtcacgtgggactcgaggagagcgtccaacagctgtccaagtttatgttcgagttctgcaaactcaaccggcgccagagaatcatccaacgaaaccgaactgagcggcttagcgatctgcttgattggagaaatctaggaatttattaccgccaggctagaataaaagcgttgcaaaccgtgtatccagattacgtcgatgaatcggagagctatctgaggcgagctgctgacttcaattaccctcgtccagttagtgccccaccaagtccaagttcttccaggcacacaacgccagctccatcactacacggatcggacgatgaacaagattccgttgattctgaagaagaattggaagaactgaagaaagctaactcgcatgactaaaagaacttaaccaacttttgagaaatgtactacagttactgacacacaaccactcaccgttcacaaattcagattagatcatagtgaatacttcccttagttgacactactagatgaggatggtttaaagaattgctgcacatgatactcaacgcaaaacgttagattacccatcaaatatccgtcgtacgtatgctggtactattttacgattttatgttaacttttgttgtgtcttttaattagctaggataaatatttcaaaatctattttctgtacattttgattgtttcgtccagttttgccttccgtgttgctaccgatgcgcatgttcagccataatattgaataatgatgttatttgtcgataattgaaaagtttatttagtcagtaagcaatcgtgcgcgaagagtttcacccaattattcctgttaattttaacaaaacaatcacgtagagctcaaatggcagtgaatcaataaaaagcctgttatgaaaccataaaatatatcattgattggatccgaac

SEQ ID NO: 863 - DNA, 1110 bp, Aedes aegypti
atggttcggtgccgtttttgggcgattttgttcgccgtgatatattgcttcaaggggattgcgtgcgcggtaggttcagcgttgtcaagtagcagcgaggcagaacccggtctcgattaccagaagctagttgcaaaactggagatattggacaccaaaatcacccgcgtggaagtgtcatcacgggagcagttttcctcacttgagtcgaagcttgataagattttgcaattggttgataatcttggccagtcgatgcacacggtacagaaaaacatcggcgctgctagagaggagatccagcaattccaaaatcactctcaaggtcaattacaagcactggccggtagtgtatcgattattgagtcacttttagttgaaagtcaccgacaaaagcaagttcagccaacgagaagtgagtcgactgcgattcgcaagacggttccagttgagcaaagatatttcgaaagctgcgatgttgcgccgaggaatgtgtccggaattgctagacttctacccgatcttggatttggtgaaccattctttgtgttttgcgatcaagattacgaaagtggagggtggatagtgattcagaatcgttacaatggttcggtaaatttctaccgcggatggagagaatacaagaatggatttggaagtttgaatggtgaattttggctaggtttgaacactattcacgctttgacctattcagcgccatatgaattgcacgttttgttggatgatttcaataatacgacggtagtggctaaatactcactgtttgctgttggcaatgagcacgaatccttcgctatcacgaagcttggtgactatagtgggacggcaggagatggtttatcttaccataggggatcgaaattctccacaatggatatgaacaatgatattccaggaaataatggtggagtagactggactggtgcatggtggtatcgaaaaggacattacagcaacctcaacggtcagtatttgtccggaaaagtcgatcacacgaagttccatgggaaaggtatgacatggaatcccttcaaaggcgatgattactcgttgaagcggtccaggatgatgatcaagcgtatattgtag

SEQ ID NO: 864 - DNA, 5981 bp, Aedes aegypti
cgatgatgaattcagaacgttcaatctgacggaatatccgtcgctcttcagccttctggctgcggttaacaaaaaaccaggttgaaggcggctggaatattctcctcaatatagtatccaaatacaaaaaatggtaaaaatggaaaattttgttaaaggaaactttcaattaattattgtagaagtgtttgctacaacaccaagctgaaaacaacttctattctgttccagttatgatccaatgtcacgaaaaatatcaataagaagatgaaactttgctcttggatagtgctgcataaaattcatggatatttcctgccatatcctaaaaaaacgttggaaattgtaatgaaccttttttcagttagaaattaagcagttattcaggtattaataagaatgacccaataaatttattaaatttgcatctaaaataggtaataataaaattaacagttctcacagagctgcatgcgatgttcattttgttcctcatgaacgttgatctctcttgcctgctcagcttgagaatatgaatttctcacccattttcccactcacgggtacatcacattgcttctcaccgatgcatttcacaccgatgaccgaccgtctatcaactctatcaactgtacgaacgacgaggtacatatctgtagataggctccgtgccgatagaagtgtacaacacacattcattacattacaccaacgatagcgactttaaactagagctctcgcaaacgcatcaacataaaaaaacagtgtgtttcagtgtgcgattgtttgcattttggtcgaaactagacttgctctgtctgagtctggtgtcctttcgaaagtgctgaacacccaacagacggcttacgcacgagtcatccagttggccccatatcattggaccctttttccgtctgcagcgcgtgataatctcggaagcaagtggaagtgacattacgtgtgaagtgacagtgtccttgaggaagcaagaacgagaagaaaccagttcctacccccagaatgatggaccccgatgaaaatgatctgatcgataaactaatttccccaacgggatcgttcggcaccggtgcccagcagaaggtaatcgtgcaacggaattcgccaattctgttccccggagggacaccgttgaccatcaatgctacgagttcgctgttagtgccaaattcggtgcccctggccgtggctccacagcaactgtcatttgccacggcatcagcaggaatagatggtggaggtggccctggagtggattccacttcggtaattgtgctcaacaaggacactccgcttccaccgggagcattccccatcaacgtcatggcagccgatccccaacagcagcagcagtttgttcatggtggtggtggtggtttgcagaaagtcatcgtcgccgccaatcccggaacgagtggaaccgtagctggccacggtggagtgcagattgtttcagcgggtaccatgaaggcgttccaacagaagttgcacacacctggcttcaaagttcaaattggaaatacgaacatcatgtcactgcagcagaaaataattgcgccaatgagtcatcaagctccccagggaccgccttccatgacaatgattcagccaagttctcttgctatgcccggaaccgccgatcttaagcgtcttccatcgtccatcaagatcctgaaacccattgccccgaaaccggtaattgctaactacgccaatacagtgatcaaacctgcccaggaaagcactatccaaacaccttcgccaaacgcgtccagtgtttgtcatcatgtgcttccattcgggacaaccatcaaagtcactgccggaaatgaacaactcccgcttgccatttccaaaccccagcaaatcatccaaccgccctctttgatccaacaacaggcgcaatttcagcaacagcaaccccagcaccctcaaatgcaaccaattcaacagcagccacaatccccatctacatcaactcttctcaaacaaatccggccgctttcgccggccacgatggctacccagccaaacaccgtactatcatcaccaacccaaaataaagtcatcatcaacaaaattatctacaaaactccggaaagtcatcttggaccaggtccaactgccggacaaccgcggatcgttgccgcaacgccgcccctctcaccagtttcaatcccagatctgaaacgcaagatcatcatcgccaacaatcccaaccgtacgcggctaccatctccaggccagtcacagtcgtcgattccacaacggtcgactacaatccaacccgctcaaacccagatcttcgtgcaggcagccaaccctacattgccactagcaccggcacttgcagcagctagaactaccatcgataacattccaactaccatgcaagcggtcatatccacctgcagcagtagcaatataaccgtaacaccgatgatggttgatcccactccaccgatgttcccttcatttcaagaagagaaagctcaatccacggttgatacgcccaccaaacaaccggatgatcttcccgaatcgtctgaaccatcgttccatagctcgtttgaggagtttagcaaaaccatatcacaaagcagttcccaggtggacgcatcggaaacggaagtttcctcgacaacaaccgaacagatgacggcaggcgcggaagatcaggaacccaaggaagattcgaacgacgaagaggcagaagcggaggaaattgagcaggaaatgttggacagctcgcaaggttcggcacgatccaataccattagtagtgagaagatcgaaaaagatgaaaacgaagaaaagaacatcgagccacatgtacaagagctgccagaaggtatgaagactccaacgaaggaacgtgatgaagaatccacgccggaggatattctgagtgaacaactcaaaagtcctcggcttcataaaagagccaactcagacgtgcagcagcattcaagtccagttcgcgctcgacggctttccgaaccaaccaaacctgatgatcccccaaaagagaatgaagaggatgtgcccccgatgccgaagcctttggcaatcatcaaaaagacccgaaaccgaagatccgtcagccgaagaagcaggtcgtccaagtcatcaatccactcgtcgcttctttgtaacgaaaagttagaaacggagtcggatgaaagtcgcagtgtcaaaacttcggcatctagtctgcatacgatcagtcccccgaagaaggaagacacttcggattcaccaccggcgtacgatcaggataagctccaagcggcgatcgagggctacaagaagaggcaagctatggttaagtcaagccgcgagaagagccgttccgagtcacgatcggtagtggatcgcgaagaaaaagaggagaaagatttcatcgaaggagatttcggttccacaccgtcggatctcatcaaatggaacgatggaatcggatacatgcggagcagtttcttgcattttcagttcaaccagtttggattggtggaaccgatggatatcaaggaatacctgaaacacgtcaacacaaatgtatacgattcgctcaaggatccagttggaagtcgaccgaccgcaaaggcagctaggaagaaacgtaaaacgccaagtacggaaggatcataccactgcaagggttgtcgaggtcgtggcactgctggggacttcgccacccctgattactgttcaatagcttgtatgaagaaaaccaaaaatgaacccctattgtcgagtattgcctattcgaagtctcttcagcgtaaaggcatcggatcttccgagtcgtcaacatccaacaccacgccattccctacgagcgacgacgactctctgggaagctcgcttaactttgccaatgcctttaaagagaagagcattttcccgcccaaagaaagtagcactcccaggccaacggttcaggaagcacccccgattcaagagctgaaccaaccaaaattctcctgggaaacttacctggccaagacccaaggcacgccgtcgccgttggatttgttcacgaacccttacccgagtggactgaaccgattccgcatcggtatgaagctggaagcaatcgatccggaaaacaattctctgttctgtgtgtgcagcatcgtggacgttcgaggctaccggttgaagctgactttcgatggctattcgcgcgattacgacttttgggtgaatgccgattcgttggatattttcccggccggttggtgccagaagacgaatcgtatcttgcagcctcccaacgggtacgacagtgattttagttggatcaagtatctcagcgagaagcaggcaacgccagccccgaggcatttgttcaaacatctcagtgtaacgtcgaatgagaacaagtttgaaatcggcatgagcctggaagcagacgatctgaagaaatcgggcaaagtttgcgtcgcttctgtgactgataaaatcgacaatcgtatactggtccatttcgacggttgggacgaacgatacgactactgggtggatattcactcaccgtacatccatcacattgattggcaccacgagaatggctacaatattactccgccaccagattggagcaaaggtgacttcgagtgggccaaatacattcggctgaagtcacggcggataggcaaggccataatcccggcggaccagtcgctttttgccacgcgacaaccgatggatttcaaaccgggcatgaagttggaggtggtggaccgcaagaaccagatgctcctgcgaccggcaacggttgtggctacggatgggtacgaaatcaaggtgtgcttcgacgggtggccgaacttttactcgttctggatcgaggacgacagctcggacatccatccgatgaactggtgcaagaggacatatcaccctattgaatttcctccagatcatcgacctgcatccatcaaaagtacctgcgaagtttcctactgcttggggcaaggcaatgccaaaattctgagcaaatcgttccacacgcgagaagcggaatgtccttacaaggccaacaactggttgctggaagataggaaaaagatgcgactaacgcatgaacaaatcatcaccctgaagagcagcagtgctccacatgaaccactgcccccggaggcgcccccagcgaagaaaatcaaaaaggaacccgaagaacctctcccaatgcaaccggagcaactcccggcgtcgataccgccccttagaaacgtccaacagacgtcaaccccctcgaatggcagcacagttccgctggatccactgataaagacggccctcccggtgatagccgacttcggtcctcggttgaagcagtcctacaaactgtggaggtccaccagccggatactggaccgctgcacggacggcatggcagattacgaccgtaatcccctgtgttggtccgtggaggacgtcgcatcttacgtggaacggtttccgggatgctccatggtaggcaatcaaattcgcgaggagcaggtcaatggaatggcgttcctgagtatgactcaggaagatctgatcaaataccttgacgttaagctaggtccggcaatcaagctatacaaccggataatacatctcaggttgcaagtggaaaagcatttcataaagttttaagctatatataataaaaattagtcataaactctaacacatgttccgttgggcatatatagtttgtatgtttagcaattgccacccgtcattaagtatggtggacgagcttattacaaaacgtatccaaatttccatgtgaaagttggagatgtctcttgcgaaccaaaataaggctcaatttggttttcgcaaaatgtaaatagtcagtttaaatatattcttccttttcccctgaataaaggattagcagtatctataacgaaatcaaatttaaataaataattattcctacagtttttgaatacagcaaa

SEQ ID NO: 865 - DNA, 2661 bp, Aedes aegypti
atgaagttacaactgtcgcttgatccgaagcaaacggatgccaaaacggagcaacgaaaggacacaatgcagaaggtaatcgatgattccaatgagaatgatgagtttcaatgggtagatgatggtggtcgagattggtcactgttcaaacggtgccgtccatcatgcattccgataacgatgatactggttctgatcgtgatggtagttttattgccactgctggatcacaatgagaagtttgctgatcaacgctcgagacaaaatcgtcttcgaaacgatgtttgctcggagggatgcaacattcagatagtggagagcattccggagggattggtttatcccaaaggaagtccttcatttatgtccacctacgaggcttggaagactttgatcggtatggcgaagaactccatcgaaataggatcgttttactggactttgaatcgtcaagacgtgtacaatcactcgagtgcttggcaaggggaagacatcttcaaactgctgctggagacgggattggctggcaatgtgtccatcaaaattgctcagagtgcaccgacttcagcgaatccatgcgttgataccgaaattctagccaatcggaaagctgcagaagtacgatcggtagatttccctcgcctttttggaggaggcgttcttcacacaaaagtgtgggtcatcgatagaactcacttctacgtcggtagcgcaaacatggattggcgatcgttgacgcaagtcaaagaattaggggttctagctacgaattgttcctgtttgacgaaagatattgctaagatattcgatgtttactgggacatgggtgttcctgattcacaaattcctgaacaatggccggaagcgtacgcaacgaagtacaacgccaataacaccctctccgttgtgttcaacaacctttttaaggtggatacctacatatcgagttctcctcctccaatgtcaaccaatggccgtagtcacgatatagatgcaatcctcaatgtcatacagaaggccgagaggttcatccacatatcagtgatggattacgtcccgttaactctgtatactcccaaaacacgctattggccaatcatcgaagacgcccttcgcagagcagcaatcgataggagagtctcaataagattactgatttcctattggaaacactcccgggaatccgagaaccacttcctcaattcgattcaagcgctatcgggctgtatgaagggagtgaacatcgaagtaaagcgattcgtggtgcctgcttcggaggatcaagagaagatccccttcggaagagtcaatcacaacaaatacatggttacggacaacactgcctatatcggaacttccaactggtccggagactatttcatcgatacggccggaatagggctggtcatgtcatcgatcgcacccaacggaactatcgtcagcgatctccaggccattttcgaaagagactggaccagtgaatacgccattcgattcgattagtttatttaaaatggtttatatacgatctatgtcatcttttacaatgaattcgatttaaaaataaattagttttttgagaaagtcgcctctttgctcttttcgtgcgttttcaagtgaacttgcagcggtctcagttcaatgaatcccttaggacaaatgtggcacttgaacgtgcggattccctcgtgcttttcgcgaaagtgtcgtcggagagctcgctgatgaacgtaagatgccggacagcgatcgcacttgaacgtcttccgtccagaatgttccaagacgtgggaattcaggcgattcttttgggtgaacgtcagaggacacatgggacatttgtgaggcctgtcagtggaatgaattcgcagatgtgccttcatcagacctttcttccggaaacttttgccacagtattcgcaattgtaaatttcttgagcatcgtgataccttacatgagcttgccaggaagctttcattgagaacttagcgtgacaaactggacattcgtacctgcgaacattccgatgggaatcttcgtgtccttccagttgcgccttttcccgaaaaattttaccgcattgagcgcatatcaagtttttctttttgaagaatcgcaaccgatgggctttgagatacttgaagcatttgtatgttttgtaacaaatgttacactccactgaattttccccatcgggactctcacgctgaggtaagtgaacttcaatggcatgttctttcaattcctcctgggaatcgaattttttccgacaaccgcaacaaatgttactcctcatacgtagctcttcgagttcacgaagttttagttttcgttggtggttcagttgtacatgtttctgcaggacgtagacattcgcaaattcttcatcgcattgtttgcatgaatgcaacatatcgacgtacattttacgttgatgctgtagcaataatttcctcacgtcaaatctcatgaagcaaactgggcattcaaatatcctatccccatattctttcgggttggttacacgcaacttgagatggtgtttgctggaatgttcttcaactttgtcttgcgaatcaagtggataattcttgcaagaacaacatcgttttggttgcgaattggcctttacgccataatatactcgctttttggttcta

SEQ ID NO: 866 - DNA, 1846 bp, Aedes aegypti
aaacgaaaagcttctgattaagcatgaaaacgctttacgaaactcaccacaagtttgatatttgagctggcttaccaatacattctagcgcgcaaacgcaaaatgcagatatgttcggcagtagtcaaagctcaaaacagctgagtcgaataagataggccaactgattgatgttgctgagattttagctgcttcagttttccaaacgatagcatttaaaatgatgtctaaagccagaatatcatctctgatgaaagtgatttctagtggatcatgtagctgtccggctcattcgcggtcatccactggaggcttgaatgtatcttcagaaaatgaatacgctttcgaagttataacaacctttgaccgcagttgaagatttgattacatacaaagttcaatttcagatgtcttcttcaactatacgctacgggccgggtgttagtaaagaactgggacatgatctgcaaaatctcaatgcaaagaatgtatgcattgttacggaccgtaatgtggcaaaactcaattcggtcaaggtagcgtttgattcactgacgcgttgtggaatccagtaccaggtttacgacgaaacacgcgttgagccaactgatcaaagcttacttcatgctgccgaatatgctcgccaaaataagttcgattcgtttgttgctattggaggtgggtccgttatcgatacctgcaaggtggccaatctattcagtgccgatcgcgaagcagaatttctagattacgtcaacgctcccataggcaaagcaaaagaggttaatgtaaaactgaaacctctaatagccgttccgactacggccgggactggttccgaaacaacgggagtggtgatttttgattacaaaccactacacgcaaaaacaggtatttccagtaaatatttgagacctcaattgggactaattgatccactgcacactctaagtcaacctgagaaggtcgctgcctattgtgggttcgatgtattttgtcatgctttggagagtttcaccgcaattccttacaccgaacgtggatcggcccccatgaatccaaatcttcgtccaccgtatcaaggaagtaatcctatttccgacgtgtgggctcgttttgcactgaagattatacgtgaaaattttatatcggctgtgttcaaccaagacgaccttaaggctcgttccaacatgcatttagcatcaacgatggctggagtaggatttggcaatgccggagtccatctttgccatgggttgtcgtatccaatttcaggacatgtgaaaaagttcgttcctgatggatatagtggcgaccatccgattataccacatgggctatcggtagtgatgacagctccagcagtttttaaatttactgctgcctcttgtccggaacgacatctggaagctgccgaattgctaggagcaaatgtttcgaaggcaaatcgtaatgatgcaggttcaatactctcggacgtggttcgacaatacatgtacaagctgaagattgaaaatggactggattccctaggttttacacgcgacgacatccaaagtctagtgaaaggaactctaccgcaagaacgcatcacgaagctagcgccacgtgcacagacggaggaagaccttgcgagtctgttcgaaaattcgatgactgtttactaaaatcgcatgacgattaacctttaatccacaaataaccatgcgtctccttcagttagcacagcacgaatcaaattacagccatgatggatgtacactgatcacaataaacgaggcattaattgcctcctgtcaaaacttctaatttagatgatattaggtaaacataaaatctgtacatt

SEQ ID NO: 867 - DNA, 1334 bp, Aedes aegypti
atggacaacgctacgtttgtcgaaagctggaacagtatcataccgcacaagataaagccggctgatctggaacacccgacggagtcgtttatgtgccgaagcttggtcagcttcttccggatgatgaaatacgatgtttcggagtttgaccacatgtacaatgaacccaaagagtccactattagaaaaagggtacaaatagtggccaacaccaatcacttctaccaactgtgtatgggatcaaagcagagaaatttcctttacgtggacctgatcaaaccctcacccaagaagacgatccacgtgctgaacatcttgctcaactatctgttctacatcaacatggttcgagacgaaacgattgaaaaggccactcagtgcactgcaaggtatcacgagctggaagccaacatcaaccagcagaaacgagaaatggaaaaccataagatcaagatcaacaatatagagcaaaacatcagtaaaatgcgacaccagctgccacagctggagtccgacaacgataagctcagagagacgaagcagcaactgttggagaagatcgcggccaccaaagcagcagatgaagagttggcggaaaagatcaccaaactgaaaatggactatgccatgttgcaggatcgacgggtagacgatgaggaagccgctgctttgatacggaaaaacgaagaactggaggcagaaattgaagagtacgaaaagcaggaaaagacactgcaaacgaccaattctgagtatgcaacgctcatcagccagatcaagccgtgtatttttgctgcggaagagatcctgcagaatccacaggatgattcactgatgaaaatcaaaaaccaagtggacactcttcggttaaactacagtaaactggaagcagagtgcgctaggaaaacgaccacccttcaggcattgcagaaaaattgcgaagccatacgagactacgttaccgaagtggagaaacagctctcggtgggacacaaagccaaacgtaaaaccgaacgccaaacaatcagcgatctcggtaagcagcagatgcagctggacgaactgcacgaacagaacgatgtctatctggagcagatcaaggcactgaaagaggaaatgctgctgataatgcagatgagcgaacaggcgaaggcttttctgatgcgagacccggtcaatcggccgttgtcatccaagtagcgctcgttaatgcttagcacaattgtatagtcctgttcgtccctcttttgaggagttttggatcattgctatttatcaataaaaataaataaatatttattccggctgcgatcaatgcactaagccaatcaaag

SEQ ID NO: 868 - DNA, 858 bp, Aedes aegypti
caaactttcatataaattggacgctgacgctaattacggcattcagtactcagtggtcaataattcgaacaaccttatccaagttaagtagtcaggatgttcaagttcctcattcttttcgctcttgtgcctgcgatggcctttgctgcggtcaacttccgagtatgttccaacaaagctccaacgccaaccaccttgactgtgaacgactgctccggtgacaattgcgttctggttgccaaaaaaccgctgtacgctctggccagtgggattgtcagcagtgttaacagcaagacggccaccacccgaatcgttgcccgtttccttggtatggacctcggtttcaggacccctccggagctgaccaatgcttgcaatggaggaatactgggtggctgtccgatcgttgccggaagagccttcaactacgttcttgttgacgattcactggaggttccggcggtcaatatgccggtcgaaatcgaagtcagtctgaccggtgacggtggcgtagctttgggttgcgttcgtttcaatgccagaatcgcgaaaagataatgcgatttcgagtgatgttttgtgttggggatggttttaaaacttgttctaacaaatgagaaattttggtaccaaagttttgaataaggattttattcaagtaaattatttattttatgtaaaatattttagcgattcacttgttatttttttgcaaataaatatatttaacaaaaaaaatgtgttctgagtgaaattggcaatattattatagaagcatgtcaaacttgtttgaagcaccgcgtgacaaattgaacatttttttcttcaagatattttacctatgcattgataagtgaa

SEQ ID NO: 869 - DNA, 2632 bp, Aedes aegypti
taacgttacgataccctgtcagttgagatcattgcaaacgaattgaccgaaaaggtatttgggatgtaagtgcgctgtgaggttgttcgtacgtcccaaggaaattattgccgtaaaagacgaaggcctaagcaaggaacacacgatggaagaaccgcacaccactccgaagaagaaattcagcggcctggaacatcacgacgcaatctttaagaccctgcaaaattttaccgccccgacgagtccaaagcttccgacgatcaaggacttcagcatagtgaaaccaattagccgaggagctttcgggaaggtctttctaggatataagaaaaatgatcaggacaagctatttgctatcaaggtgatgcgcaaatcggagatgatcaacaagaacatggtatcgcaggtgatcaccgagcggaatgccctggccctgtccaggagtcctttctgcgttattctctactactcgctgcagacgatttcgtccgtctatctggtgatggaatacatggtgggaggcgatttgaagtctctgctggccatgtatggattcttcgaggaagccgccgccagattctatgcggccgaaatatgtctggccctgcagtacctgcacaagcatgggatcgtgcatcgtgacatcaaaccggacaacatgctgatttcggcttcggggcacgttaagctgacggatttcgggttgagccggatcgagatgagtcgggatctggagatttcggatctgataaactgctcgccgagtttgaatgctaggacacctgggcagttgctttcgctgacgtcgcatctgtcattcggttcccacgataagcgccttcaggaacagcttgagaaggaccgtttgcagcaatcgtcggaaagtgaactagacaattcctttacgcattccaagcagaacgagagcaaaatgtccggcgtgagtccgttcttttccgcggagcagaacgctagtttgctggaggaactaaaagaggtccagaaagtggtggacggcagaatgacggcggatatgtcctcgtcgtattatacgtgcaattccagcaccgaggggaagagcagcagcggaagctacacatctctcaacggaaacaatgccgagtgccgaatgacggacagacaaagctgtgatagtaaggaaggcgcggattgtgacaaagaaaaccaccagcagtgtggtaacattagatcggtaatgacggagaaatataaggattcgttcgatttcctattgcttccggggaaccacaagtgtaagacacacgtgagcaatgattcgggagtttccagtcggaagagcgacatatcgaacattccggccgagctgtcggccatcgagcggccgacggattgctccggccatcacagcagcggcaataaggactactcgtgttcggatttttctcgcagttatagtatgagtaacataaatgaatcctgcaattcgagacatcactatgattcaccgataaagaacggaatcaggtgcttcaagagaccggagtactttaggggtataaaacgcaaacggcacccggtgagccgggtcgattcgctaatgtcggacccggatggaagcactgccagcaccggtctcacccaggaaattgacgtgatggacatcggcagcagcactccgaaaaaacgaaaggcagcttcccccatcaaaggtgtcctcaaagttcgttctttgtccgacgacgaaatgccggttaacgaaaaccacggaaatgtaatgttctccacgccggtttcctcgcagaaaatccgccgcgaaggtggtcagttagctaaactcaaaaacacccgcttcgtgttgccatcatccgtcgagcagctgcggaaatcggaagccttcatcaaaatcaccgacgaatccgtcatgtctcccatctgtacaggtaattcgtccgtgcccaatgtaggaaccacgcctaaaactgtcaagacgccattcaggacaccaaaatcggtacgacgggctccgatcgagtccgatgagcgaatactcggcactccagactacttggctcccgaattgcttctccagcaaggccatggcccacaagtcgactggtgggcgttgggagtctgcttgtacgagttcatgaccggtgttcccccattcaacgacgaaactccccagaaagtattcgagaacattttaagccgcaacatcgaatggccccaagatgacgaatccctctcagtggaagcggtcgaagccgtggaacaactgctggatatggaccccaccacaaggcctcaggccgatcagatgaaggctatggcgttcttcgaactggtcgagtgggacaacatggaatcgatgccgccgccattcatcccgaacccggatgacccacaggacaccgggtactttgaggcacgcaacgtgatgcagcatttggtcttgtccaacttcgacatggatgcctactgacggaggacggagtttgagcccgaaaagcagacactgggatgtttgtgtgcgatggggtgggacgggccccggtaaaattacgcgtaacaattgtaacctgttatatcttttatttgtaggaataagaatttgtgataaataaactcggtattaaagactcgtcggcga

SEQ ID NO: 870 - DNA, 745 bp, Aedes aegypti
gcagtaaagtttcactgtgacgtcatggatttttaacaagctaacacaacacaggcaaacaatttcagcttgccgaaacctgctatatataacttaatcctttcaatcttgccaacaaaatttattagaaaagaatccttatcactatcagctcgttattgtttcgttttatcttcatatttcattccaatacgttttactgattaggtgtcgtatacctttttgaattgacaatcccactagtattaactcgagtgccttctggtgacattatcaaatcagacgttgttcaaaatggttcagaaacactccgtagccggctacgaaaacttcgtcagctttatgaaggacttccagagcaatggccagatggtgaatatccttttctcgggagctaagctggaaaacggcgtcagctggtgcagtgattgcgttgaagctgcccccttcatcgaagcggccctggcaacggcaccggcagaatcccatttcatccacgtagacgtcggggatagaccaacgtggaaagatatgaataacccgttccgcaagaatagcgatacccatctcagcgttattccaacactgatccggtggaagaatccccagcgattagaaggcgaacagtgctgcaaggcagatcttctggagatgttcttcgccgatgaggactgaatgatgaaatggtgtaacattacggttcagcgaataaagcaagatgtgtgggaattttaatcattcagct

SEQ ID NO: 871 - DNA, 684 bp, Aedes aegypti
atgccccgtccagtgaagttcttctacgatctgctgtcgacgcactcgagagccctctacatgttctttgaggccaccaaaatcccgtacgatccgattccggtttgcgccaccaaaggcgagcatctgaccgacgagtaccgcgagtgcgtcaaccgcttccagcaagtacccagcatcatcgacgatggcttcaaattatccaacggcgtcaccattctcaagtacctgatccgtgagaaactaatcccggaacactggtaccctcgcgatagccaactgcgagccaagatcgatgaatatctcgagtggcagcacgacaatagttcaaaggtgtgcaatgcctttgtccaggaaaagtggagcctcctgaacatcgaagacgaacgctccagcgaacagaaagtcgaggaataccgccgccagatggagcagaacctgaatcagctggaacgggaatggttggtgcccggacggttcatcattggcgatcggattaccatcgcggacattctggccgcttgcgagatcgagcagcctaagattgtcggcatggatccgttccagggaagaccaaagctagcggcctggctcgaaaaggtgcgttacaccatgacgccctactaccaggaagcacaccaggacttttacaagttcaccgagaaagcctcggtgaagaattga

SEQ ID NO: 872 - DNA, 880 bp, Aedes aegypti
atgcagattgcggagaagatcggaaatccaactccggctttgtcattatgttcaacagcggcactattagctgggcgtccaggaaacagacctcttcccggaatgatgagtgtcgattacgctattgtgggaaataatgccagcatacttgtgtcgcctttttcacgtttcggtaacattctggacgtctgcaacgtagttaagcgagtgaccagcaaaaacgtcgatgaatttatcgccatggtcatcaccagtcagatactgtccattatagaccacctgcacagctgtatgatcatccacgccgacatcaaaccggataattttctgctaatgaatcctgttgatttggattctgcgataccgtgcgtgcaactgattgactttggtgtttccattgatctcaaattgtttcccaaggacacaaccttcagaaaagtcgtaacaacggaatgtttcacttgcattgaaatgctcgaaaggaggccgtggacttatcagccagacctgtacggtgttgctggaacgacacacgtcatgctgttcggaacatacatggaagtgcagaaagatatcgtcaattggaacatcaaggcacggatgccacggtatttccggaaaaccgtctgggacaactacttctcatcgatgctgaacatccgtgactgtaacgaaatgcccaacttgcaagcgttgagaggcaggttactggcagaaatcgaagaaaacagaaagtatattcgtgataaggtaagcgagttcaatcaagctattttatccgggtgaacacaaagtcaaccattgactacagatgtaaaagtattttaattaatggaactaatctttctaatcaaatacaaacaatttcttactaggactg

SEQ ID NO: 873 - DNA, 2658 bp, Aedes aegypti
atggcagaaattccgagcagcgagatcccttcgtggatgaccaaggagtattttactgatgtggtagcccagaagttgggaatcgctgaaagtgaggtggaaattagtgctcttaacgtgaaacctgccaccgagtctggggataactttgcttcgaagctgtatcgcgtggcgatcgatgtcagctgcagtgatggatcctcaaagaaaatcccattgattgtgaaagccttgcccaatcttggtctggctgaagaaatgattcagatgttgaacattttcccaaaggaaactgcaatgtacgcggatttattgccgaagtttgaagaactataccgcgagaagggtgttgaagtcagcttcggtcccaagtgcttgaagaacagcactaagccaacggacattatcgtgatggaggatctcagcgagagagatttcagaatggccaatagacgagaggggctcgatcgtgctcacgtggacacgttattgaaaaagttggctcagctgcatgctgcttctgctgtgtatcatgagaagaatggcgagtataaggcttgctttcaggagggcatatacgccgagagatcgttggttatgtttgaaagccacatgaagtcacacatggagtcgttgtcgcgaatcattcggaagtattggccaaacggagagttctatcatgacgttatgaatgatttcgggatcaatatgttcttcgagatgattaaaatagttaaggccgacccgaatggattcaatgtgctgaatcacggtgatgcatggtgtaataatttcatgttccgatacggtgcggacaacgcgattgaggaaatcactttggttgacttccagatgtgcgtatggtcatcgcccgtcatcgatctacactactttatttttacgtccatcaacccaacgattcgtttgcctcaaatgaacagtattattggtttgtactaccgtaatttggtcgacaatctccagctgctcggctactctaagaacatcccaaccttgaaggaccttcacctggacttcatcgataagattctatatggattctcatcgtccttctcggttctgcccatttgcctgatggagaagaccgacaacgcctcgatcgatacgatgatggccgatggtgaagccggccatgctttccgagaaaaaatgtacgccaatccggtgtacttgaagcagttggaagagcttctgccatatttctacaactatggagcgtttgattgtcggcacactggatatcaatcgccaagtaaagtctacagtgattacctcttgcttcccggatggatgcggaaggaattcttctatgaggttgtcgaacgaaagcttggtctggaactgggacaatattcgatcgagaaaatttgggtggaaatggccaccaagaaaggtgataactacggatctacaatgtaccgcgcaaaattagatgtattggataaaacttcgtcgtctttgaatcagttctccgtcatcgtaaaaagccgcccaactggaatggctgcggaattcagcaacaagctagatccattttctaaggaaatcgaaatgttcacgaagattattccagcatttgaaaaattctacgaagagaaaggtgtaaaagtagaaattggacctcggtgcttgaaaatctgcaaaggagtcccgagtgacattatcgtaatggaagatttgtgtagccaaaactacagacttggcaacagacaggatggtgtcgatcaggagcacgtagaatcggttttggagaagctggcagagttccatgctgcttcggcggtttaccatgagcgaaatggagactattcaagttccttcaaagaaggtttgtacaatagaagcaaccttcctacgatggaatacatgttcagaccagcttacgagactggtttagaaatattgaaatcgcacacgtttgcaaaagactacgtagatgatttggaaaagcttcgacctgtgattttcagtagaacaattgaaaactttgctgtcgatcccgctggatttaatgtgttgaatcatggcgacttctggatcaacaacgtcatgttccagtacgacagtgaagatcgtctgaaggattctacgcttctggatttccaggtgtgcttctatgggtccccagctttggatttgaactacttcttatttgtttgtgtaaagttggatatccgtctctccaagctgaaccatttcatccgatattatcacgaaaagctagtggataatctaacgctgctggggtacggaaaagctttgcccacgttgaagagcttgcagtatgatttctacgatcgaatggtgtacggatcatccaacattttcggtatcatggctgttttggccgttgagccatcggaagacgtcagttttgaaaagattcagcaggatagcgaagcgggcaaggagttgcgaaaacgtatctacaccaatgagcgatatgtgaaagctttggaacttctattgccctactttggagaccgtggagcattcaaggaaggagcggaattgtgcagctttttcaaaaagaataaaacgagtgtttagttttatatcgcaatagaaacgtttgttttggaaaacgattccttaatttatgacagtggcaataaacttcaaatttgagaaacattc

SEQ ID NO: 874 - DNA, 447 bp, Aedes aegypti
tacacgtcgtcgtagcttggaatgtcccaatgcataattttttgaaacagtatatatttcggtccataaaaccaagtggcacatttgcagctgtctttttgacttatgttacgtcatcgctacttcatggattgaactttcaactgtgggccactttattgacgataggtgtgtggagctacgtagaatacaacataagaagcaaactggcacaaatattttcagcttgcgttctagtcaacaagtgttcgaatacttgcacaaaacatcatttaggacagagcagaccgatgactattttcattaatgttactcctttaagcacacgctggataaatggcaaaagctagactatgcttcgcattggctgctactactagtgtacatttttaactggataatttgattcaagataacatcgtctctctcagtattaaactttgtgat

SEQ ID NO: 875 - DNA, 2106 bp, Aedes aegypti
aggggcgagacgaaaaggcaggcggccggcagaaaacagtccagttgtcaaactccacgacagcagtgagcagtgtgaaagggggtttagttggtggaattcaaaacgatgccaggcaaaaccgctgggcatcaggtaaaaaattgcgattctgtaaacaaagcagcaagctttttgaaggtcatcttatttgttgatcatgttttgtgtgaaattgttcatggataagcatcatttacttataaaataacgttttcaacagtgttcatcacggttaccataatatatgcctatgccgagacctcagctaacaaaaaaaatagatgaaataccatggaaacgctaccagttgagatattggaaaaaatattcaaacatctacgctacagtgacctgaagcaagtgtcatctgtttgtcatttgtggtacgatgtctaccaacggtcgtcattcatgtccaagatggtggtacatttcaaaaaagaacttacactggacacgatcgacctttttctccgcagtgagtgtctgtaccagaacatatgtttcacttcgattccattctacgacgttgccaagtcaaagagaagcatctgtcggaaggacgtgatctacgaagatagtcgctttgtagaaaaaatacgtcaatttctgcttaaatttgctgactccgtgcagatgctgtcattctgtaaatgtcaccttgaaagaggtagactgatcgaatttctggaattaattccagaactcaaaggactggaatttgaagaatgtatatttgccggtgatgatgcgtgcgtggcatttccgttgtccaaattgaagaaattcaatttcaagtatccggaagatgagattcaacgattcgagtctggacatgtctacagttctctggctaaagttcaatgcagcttggtcaaacttaaggttcagttgttcgtgaatgaaatgttcggtgatccggatagtgacttatgggagcaggtcaaggctgttacccgactggtgaagttgcacaagaaaactatgaagtctttcaaggtagacagcttcaatgatcctgctctgaaaaagcttgtttttgacgacgaggaacttcaactggagaaggtcgtgtttggcgaactaaagctaaggaaagacgaccaagtattctttaattttctagagaagcaaaagaaaatcaagaaaatggaaatatcaattgaatccagtatagacgccaataatgatcagtatctgcaaaccatctgtgatcggttacagaagttggaacaattctactacgacatgtcccgaaattcagacagtggactggagaatctacaaaaactaaaaaaattgaaaaatttagtgctgacgaaaaataggaataccgtaggactgacagagcactgtttcgatcacatttatatgcccaatctgaaatctttaggcatatattacaaagaactgcagtttccagcagtgcaacaaataccggttagttttcctaatcttaaggctctcaatctaagcgaatgtggaaaaggcgtaaccgatgaaacggttcaactcatcttccgctcgctaccggagctcgaaagccttgatctcagcaaatgtaagcaagttaccgaacaggctttcctaggctgtaccaaaataggtaacttgaggaaattgaaagacctagtgttggaaaaatgtgatggcgtaacggatttgtcattggctgcattcgacaatccggcgttaaagagtatcagtgttgccatgtgcacaagaataacgaacgtaggttgggaggcattgtgccgtcaatgtccgaacatcacatggctgaacgcttcgcattgcaggaacttcgatgaccaatcagcgttgatcgttgcaaccatgcttggcgaattggaagttttgaacttgttcaaaaactgttcggtaacaaacgaagcggtttacagtttggtagagaactgccgatatttggaggatctttgttttaccaaatgtagaggagttaaaatgaaaaagcccgagtattttgatgacaagatgaatcgagtcaacaaagattgtctagtgaataaaaagaaaatttaactttgctactgtgaatacaaa

SEQ ID NO: 876 - DNA, 1356 bp, Aedes aegypti
atgctggttgaaaaattcctacagataaccaaagccaaggaacgatactacgccgactcacaaacccatcgacacaaactgcgaatagtccaagctctttgtgtggtaatcaagctaacaggaacaaaaccgtactccctgttagacatagtcctgtacgagacaaatcaaccgaacatcaactacctcatcgagttgattcttgcagactcaacaatcgacactctaaccattatcaactccctcaagaatgacaaagtcaaagtgtccggcgtgcagtcagtgttcgtcattctatggttacgatgctgcaaaaccaactacctcgacgcggaatacatcaactttttgttgccgtggactatggcacagaacttttctacgcgcttgtacgcacagatcaccatatccaaactgttggagaagttctacgaaaagcccaccaaaccagaccaatgcccttttagtaacattttcagtgcaatcaacagttacctcaagcaaggcaacgtggagaagaatttggagaaatgtatgaaagacttccgcttcaacagcatcttcgattacgacaatctgctgacgctggaaaacgtgttccacaatattcccaaagtgtctgggatggcttcggaggatgttgttgggactaaaagtcttagggagtgttttgaaacattgcggttgagcgaagttaatttgggggacgccctgaaattcgattatttgactagtgagaggaaggagaatttgttcctgaaccaaggttttggcggagcagatcatattcagaaaaagatagttccgctgaagtgtttggagccaacgttggaactgcttacgaatttgccagagaagctgcgcttgaaaaagaaaggcaatgtcgagggcttgatcgttgtagcaagtctagtcaacagagcgccaaatttaggtggcttagctcgcagcagcgaaatcttcgcggtgaaacagtacatcgttaattcgttgaaggatttggagaacaaagaattccaagcgctgagtatgactgcggaaaagtggttgaacgttgcggagctgaaatccttccagattgtcgactatttgctggagatgaagtcaaaaggatactctgtcgttggtgcagaacaaacgaccggaagccgaccgatacaacagatagaatttccgaaacgctcgattctagtgctggggcatgagaaggaaggacttcctgcgcacataatttcccatttggatataatagcggaaattccacagttcggagtggttcggtctttgaatgttcacgttactggtgctatttttatgtgggaatacgctaaacagcatcatgtggttgatctatga

SEQ ID NO: 877 - DNA, 1502 bp, Aedes aegypti
agccagacacctttttaagatctaacttgtcattcagttttacgatcgggcttcgcataagtttcgactccgcgggatcacaaaattgattataattaggtagtttttggctgttaaaacttctaaacgttatcaaacgctccggttttttttgttaacaagtaaaaatgtccaaggctcatcctccagagttgaaaaagtacatggacaaacgtttgtccctgaagttgaacggcggacgagtggtttccggtattctacgaggatttgaccccttcatgaacgttgtgcttgatgaatccatcgaagaatgcaaggacagcacgcgaaacaacattgggatggtggtcatccgcggcaacagtatcatcatggtggaagcactggatcggatataatctcccgttggctccgttcatgggagtcaacgtaatcttcttcgtagcgttaaggacatgtgtgaattggtgaaataaaacgttcaattgcgatactggatattacgtaagtctgttttattgtacactggatgacataatatggatttgtgtttgcctctggagtcatttgaatgaatgaaatgattgcttcttgacgacaatagatgtttttctaccgatagttttcaagaatccatgaattacagtggttagatgattaaaatattttcggaggtctcacgttattctcaattgccagcaattctcttacgatgccaatatcgtcgttgagagcaaaaattcaaattattaggacaacttttcgtccttcacggttgctatatgttgcatttcggaggtggaatcatttagaaaatcctgcccaaatgaagaatttgctgatctattgtgttctgttgagtggcaatcctcagcttggctctgcttgtaacgttccacttcttcgtgtaggcgattattgatgtccgtcaactataagaaatacataaaaactcataaattgtacggtattacaactgcaatgccttacctgacgttcgatttgctgaatttggtctttggtttccagaatcttcttatccaagttgggatcatgttcctcgtgttcgatgtcccaacctgcttgttgctgttgaagttcgagcgccttttgctcttctagcaattgttctaattgttgctgctgtttctggagaaagacttgctgttcctgcgcagatggcgttaaatacttcacaactcgtcgagtatttcccgctgtatcaatgttatgaacggtgcgcttatgattggtcaattggtaacactggatgaagccctcattgcaaatatcgcaacggtatcgctctccggtatgacgccggacatgagctttaaggtcatttccttgagcaaaactttttggacagtgtggacattgataaggcttcaagccgttgtgagttcgactgtgcactacaagattgtaagcccgatggaaacctttaccgcagatagtacaaaggtgagttttttcgttggtatgatacttctcgtgaacct

SEQ ID NO: 878 - DNA, 902 bp, Aedes aegypti
cagtttgttatttatcgcaccggtgaactgcccgctcactgcccacatcaaaaatcgttacaaatcaccacgaattttgatttgttttacgatcatttctaggatttaactggcaattattacaattattcgcttacgtgtaaatagttcctatcgaagtgaggatggcaaccagcactcaaaacgctatcaccctcaaaggatcagcagccatcataacggaatatctgaactacggcatcaactcgatcctgttccagcgtgggatctacccgccggagcagttcaccagtgtgcagcagtacggtctcaccatcctgatgtccaaggacgaaaagatcattgccttcctccaaaacgttctttgccaggtgcaggattggctctctcgcaacgaggtggaaaagatatcgatggtcatcaccaatgtgcacaccaaagaggtcctcgagtgctgggatttcaaggtgcagaacgagcccggcgatgggcccaagatcgatccgaacaatccgacttcgtcaaaggagcttaaaaagattcaggcggaaatccgggacgtcatgaggcagattgcggccacgatcagctatctgccgctgattgagtacatctgtacgtttgatgttctgatccatacgctgaaacagacggacgtgccggaaaaatggaacgaaaccggagacgtgcaaatccagaacgcacagaccgtgcagctgaagtcgttctccacggggctgcacaagctggatacgatcgtaaactataaaatgactgattagtaaaactgggagggtttatttagtgattaggataattattgtaaatgattatgcaggtagcacggatcatgatataagcttataaagggttttttaaccaatgattttaccaaaataaaa

SEQ ID NO: 879 - DNA, 1832 bp, Aedes aegypti
ccagttgaatttcaagacagtagcatcatgtcgcgaaattttacgactgggtttggtattatatgttttgtgttattgatattcagaggaaagtcagtacattcggcagaagagtctacagaagcagttgctagcagtaatggaaatactgataattttggatatgaagtgttgctcacgaaaatggactacatcgagtacaagttgatggaactggagtttgaactgaaggagcaaaatgaacaaacgacgcgcaatcaagcccgattggaaaagacccacgaaggcatgtcatggatgatgactaggatggagcaagccataagtcaaaattttacgtcggtgttgggacaatcttggcgaattttgcaacagcaaataagttgttcccatcacgaaagcttacgaaatgcaattttcaaaatgaaacctgtcaaaggaccttcggataacgtaaggatgttgttcgacctgcagcagtttaaggcacgaggaccatttgagtcgtgtaaggcagagccgagtaagacctctggaaaatatatgctgcaacctttccttacggaggacccatttgttgctttctgtgagcaaaccaagttcggaggcggttggttagtgatacaacaccgttttgatggttcggtggagttctacagaaactggaccgagtataaaaacgggttcggagaagccgataaagagttctggataggactcgatcgtttacataagttaacgaaagacaaaagtcaccaactgctgattgaattggaagattttgctggagaatacaaatatgcccgatatgccgggttccaaatcggcgatcaatcggagaagtattcccttaaaactctgggagcgtacagtggaactgcaggagactcactgacctaccataaaggaatgatgtttacaactttggatagcgacaatgacaaaaatgctggtaattgtgctgaagtttgcacgggtgcttggtggtacaatacgtgtcatcatagcaacttgaatggaaagtttatgactggaaatgatcaaagatctatcacctggtaccattttaaaagtgcacattatggtctcaaatacacacgaatgatgatacgagagatataggacgtttcctaaccgtagagtttgatcaagttggtttcgtaattgtgttggccgcgtgtattgagatttacagcatataggacaacaacaaattagttatacacggtacctacatgacgtaacaatactatgtatactcatcatcagaagaaaaacgacctccaactgcattacatctgattgactgcaatctccatattgaataagataactttaagagcatcacaatagatttgaatgtgattattttaaaaattgtttatttctttatatccataaatccagaaatctgtcattagctgtgcaataaaatggaaatcatactgtcttatcgcccttggcgagttcgtcactattgaattgaaatactttcggttgtttttctacaatttctagataaattcgtttataaaccgaaaaaagccttaacatgttccccagggatgttaataatttaccctcacattcgtttcccatgaactctaagatgtgtaagattccacaaaaaatgtgaatgaaaaactacaaacgtgtagtttaccgacatacattttgaccgaattgttgaatattcacgaaaagaaataaaccttaatttattattatttgaatctaatatttcgttataagaaacaaatatgtatgcactttgtttaaaaaaaaacttattctaaagacaaatatctataaataaataagtgtaatatact

SEQ ID NO: 880 - DNA, 969 bp, Aedes aegypti
gaaagtagattattgttggtaaaatataattgttatcgtaatataggcatgctttaccaagaaaaaggaaacaacagtttggctttagactacttaactcatgccattgagctagacgacaatgatgtttatacaatgtgctcactcgccgaattagcaattaagaatggacaaattccagttgccaagatatactttgaaaaatgccttgaacgtaacccgaatcactggccgagcgtagatggtatgctacaattgttattgacatcagaaaacataattgaagcttggttatgggctatccattgtcataagatggataaaaactacagaaaggcaatcgatgtgttacaagaaataaacactagatttacatccagtcgtcaatttatggaaaatctcctgaaggaaaaacttccaaccccatacgcagtcgatggtgtcattacaaaatactcaaactttactaaaagtaattgtgctgccttagttgatggcactgacaaccgtatccaagctgacattgattttgaaaagattagaatttcgcaaataaactggacaaccataggtactttgatacttcaacttcatcagcttctgaagcaaacagatcagataataaaacattttcatctaagcgattgttttggaaagccaattgaaaaacagatgtgggattgcaacgtcgtagatgctccgtcttgccacataatatcagatgatactgcgccagaaataacagatgccaggagctcaacaaacttagattcagcaatggacaacgaagctaaaagtcgtcgccgaggtagtgaactaaaaattctagagcaatggggctggcacaaaaatcgtcggtcaacgaaaagaaaaagtttgcatgatagtgcagaattcatagaatcaactgctgatggatttctgaagcgggcattgtcgcaatattttatgtaagtttttgaatagtga

SEQ ID NO: 881 - DNA, 2178 bp, Aedes aegypti
gaaatcgctaaaatggttgcaaatacgttcacaaaatacgcgaaatatacggtagaagagctagaatcgtacgtggcggaccccaattcatgtgtgcagaagctggagtggacaaacctggtttccgtactgccaaagtatctcggcgatatctgcgagggagtaaaggcatgtctgacgcaaaagatcggaaagtatgaccggacggttgatgggataattctggcgttcaagaatacgaagatcctgagtcctttgtcggctattaggcccaacagtgtccggatccatgtcaaggtgtcgtcgaatttctacgtgtttcgtcccatcagtggggccacaattgaaggaaccatcaaatatgtctcgaagaattacctcagcgcagtcatctatggggttttcaacgttacgatccggttgcagaagcaaaagttgcaggaacagaaacaaggacgggtgataagctttatcgtcaaatccttcgacatgaaaagcgacctgccgtatattgagggagagcttatttccacgccggatgatctggatgaccaactggaattggtagagcacagggtgaagaaggagaaatcgccgagaaaatcaataaaagcggagccaatggatgtccaggaagaagttactaacgttcagacaaaatcagaagccgactccacaggaatggccaccgaagacggtgaatcggacgatgaggatgatgttgagagatcaatgaaagctattttggacaatcttcagaaagaaatgagcgattcagcttcagaaagtcattcgaaatcgaagtccgggccgaaagcgcaggatacgaataaaaagaacaaacgaaagaaaagtggcgattcaacaaaaatgaaggaaaaaagcaagccaaaacaggcgaaactcaatgggcacgacgaagatcccaaggacgacatcgaagattccataaaggccattttgagtggtattgaaaaggaaatgagtgacgtcgcagattcagattatagttcctcgcagccgaataaatctgaaataccaacgccgtctgccataaagacagaaagaatcgataaaaagcctaaccgaaaaaatacaattgaatctggttcacccaaaaaaggaagcaaacggaaacaacccaaattgaacggacattctgttggtgaggaaaacaaccagcatgatgatatggaagactcgatccaagccctattaagtggtcttgagaaagaaatgagcgacgctgtggaatcagaccacggtgcctccaaattagaggacaccaaattggaagcaccatcttccgcaaagaaatcttctgggaaaaagaagaaaaagaaacaagagttcaacattgattccctggagcaagaactgttacaaaaacttgcagccgaatacagcgaaccggaaacagcagagtccgcggtaacgcaatctgcaaagaataagaaaaacaaatctaagaaggtgaaagaggacgactttgaggcttcgattatgtcttccattctgaagtgtgctgcgtacgctgaggagagcgaatccaagaacagtcctgcctcgtcgccatcgaagaaaatgggtaaaactgcgcggaagtccgtacggttcgataacaccatcacggaagcatcgttcaatgcttttgactcgtccgagcttctggaaatatcgcagctccagtcaccatcgttgtcctccacgttgaaaggcaactcgtagtagacattcagttgatagttcccaacacaagataatgtgctgtaatgaatgacagaagattttgcagagtattgcaaaatgctgtaaatggatcgtttgtttgagaaccttacaaaccccatattgattaaaatgtgttttattaaaagtctaaatcgaaactctaagaaagaaatcaatcatcgttaaaaggataaaatcttaaaacaagcagtttcaggcattttttaattttgaatacacaggatcatcgttactttatttcaactgaaaattttcatcaatgcttgttcttatattactcaaagtggacgtttatgatttgtcagacaaacggttctattagtaatacttaatttaataagtgtaattttcaatacaacgctaactaagatgttcattgtcgttcacctagccaaaggatgtaagtaatattacaataaaaccgtt

SEQ ID NO: 882 - DNA, 1494 bp, Aedes aegypti
ggttgtggccaactttgggcgctctgcgatggaaaggacatggaccggacgctgttgatgcagatcgagttgaatggcgagcggaagtttgtccgaggtgcggtgaagctgttggggtatttccccgagagccaactgaccatggtccgccttcagagactgcacgaagcgaaagcggccggcttctcgaaggaacttgaaaccagcatagagctgtggtacaaaatccagtcccacataagcatcaaacttcgctggataagccactcgcagaatccttcgttttgcatcaaccagaaggcggacattgtcctccggcagtcgattctggtggacgaaacccaatccgtggcggagtacttctggagccagctgcacttcttggaaacaatcaaggaccggattctgcagattcgaagcgaagggcggccaaatccggatgacgatagctatgtcgggtcgttggatgtcagcgtgattaaggagaagacgcacaagattctgaccgagttttgcgttgtggagtcgacggattacaaactgggacagattgactcgattgtggaacgggtgaagaatcgaactgcggtggacgttacggatcggctgtggagtgtgctgaaatattgcgcatgttacgatgatttgaaagatgttctgacgttcattttcaaaatcgcatctaggagtaatctggcgaacatcccaagtaacaacaaccgactagctcagctcatcaaatccatcgcccaaggtcgactggccattccaattctgaccggatcggaaccgttcgagctactgctggaaatcggtctggaaaagatcttcaaagactaccagatcatcttccacgagagcaaaatttgcaacctggaccttgatagggtcggtcgcaactcggctgggtccggttcgagggatgcctcccgtgcatccagcattcgcaagtcgatgtacgatgccgttccgtccaataccacccagagtcgaaaaacggccatgctttcccgcgcgggaaccagtgaggatcacgaagacgatggcgttattcgaaatagttacttcaacgctgatgaggccaacatgaagataggaaagctggcccaggtccatctgctgctggagcatctcctgtccatcgagacgcacctgaagctgaccagcatctatccgcaggtggcggaggagtatttctcgcgaccaacggtaagttttgaagaaatgcgatcgaaaaagacggacaagctggagattccgattctgaacaattcgatcattgagttggtggagaattccagtccctacatccggaaagtgggaatgaccagccggagtaagtttcggacggtggagagcattttctaccagagctcggaaccaattttgcctaccaatttatttcctcagctgaaggctgagggtggggaagtgaaaaatgcctactggtgcctggagtataccaagattagtaataattggagcatttcgtag

SEQ ID NO: 883 - DNA, 1628 bp, Aedes aegypti
atctgtgcggagcaaaaatctaacagacgccgcggagcgcagtgaagttttaactaattttttttatgttttttaaattgtttgtccaaaacgttgcaaaattattcgactgtgatggccaatgtcccgtgtaaaaacccactgaagtattgtcgtctgtgtctgtccgaggatgaggaattgatcttgatggaatcgggcgacaagttgaccacatccagcaaactgctgctgcagaagttgttcctctatatgaagataacgttccacaacgagcaagactacccgagtgcgatttgctacagttgtttggatcggttcaacaactttcacgatttccggcgaatggtggtccggaaccacaatgcggtgaagacgttccgtcgcctgttcggagatcagtatgacgaggaacccaccaccatgatagaggtgatagatgattcgcagcaagagatggaaattaagcaggaattcgaagcggaggagtccaaacttgctgaacaaatagaaattgattacaagccaccgaaggaagaagtcaaagaggtggacgtctatcacctggatggggagctgaagaccgtggtggtcaaagaggaaagactttcgccggagaaatcgctgccagcaactcctgagaaggagcaaagtcaggaaccaaagagatctccccccgttacaaatctcaacgcgaatatcagcagggtaactgtcctgaaacgtccccaagggaaagtgttgaacttggagcatgccgagaagcgagccaaggcggccattttatccagattttcggtggtcaaatgttcacattgtcgcgctgtcttccgaaaccgtgagaatttgcttaaacacgagagggatgatcatcaaaatgttaccgaacatctgttgaacaaaaacgctccctcaaagtctcttccggttataaaaactaggcagatttccaagccactgccacactctccagtggcccagttgttcaagtgtccccattgcagcagcagttttattcagaagtccaactacgagcagcacatcaaaacttgcaaggctgctgcactatcgaaactgaatccccaaatagttgttaaacgaaccactccggctgccatgaatgaagtgataaaggcagccgtggccaagattggcagaaacgtacaggtcaaaccggttgaactcgtccaggtgaaacaggaggaaacggaagaccagcgcatccggtgccactattgtcccctgacctacaagacaaagtacttcctcaagaagcacatgctggacgtgcacaagatcgacgactacgagaacgtgttctactgccacgtgtgcaagctgaactactcttgtgacgaggatctgcagctgcacaaccgggccatccatcggttccagtgcaagcagtgcttggaggactttaggacttgcatgcacgcgcaaacgaacgacaccaggacgagcgagaatgggatcatcaataaaggtatttagggttgaagagtaagaacagcccccagtgctagtcgtaggaatgatagagaaagccttgtctttattgagcatgttttagtcgtgtcgaacaccgttttaatattttttaaaattttaaacatcgtttaaatgtt

SEQ ID NO: 884 - DNA, 871 bp, Aedes aegypti
aattcaatggattaatttgttttaacgtaatgtttaattgcttttcatcatggaatgggaaaactacgtaatccaacaatgcccggctagtgctttctacattccggacttcatcaccgcacaagaggaaacgttccttctgtctcaggtggccaaaacgcccaaaccccgatggactcaattgtcccacagacgcctcatcaactacggaggggttccacatcctcggggaatgattgccgaagcgatgccaccgtggttgcaaaactacgtggacaaaatcaatcaattgaccggggtattcggggacgacaagaaggccaatcatgtccttgtgaacgaatacctcgccggacagggaatcatgccccattctgatgggcctctgtttcatcctacaatcacaaccatttcctgtggatcacacgccgttctagagttctacgagccacaggaaaccgaggacggaacaacaacgacgatgcaaagggttccggtgaccaaattgctaattgagccccggagtttgctgatcctcaaggacgacatgtaccacaaatatctacactatatcgccgaaatccgacaggacgtgatagatgagaatgtttcaaatatctctaaagtaagtaaggttcaactcagcgatgtcctcgaaagaacaactcgcatttctttcaccattcggcatgttccaaaaacgtccaagatgaaaataaaattgttctaaggttcgtttatttaatgaggatgttttccctaaccgactattctgtcccttattctgcgagtcgaattgaggtaacaaaagacgactcgctcctaggttgatttttttccctaatacactgattgtattttctatctaaat

SEQ ID NO: 885 - DNA, 1034 bp, Aedes aegypti
cgtcaacgcccggggggcgtcaactctgactgaaccgaacctgaactgaaccaattacccattgtgctcaagctgcaattaatatatatacaccgtatactgaagttataattcataacattgactcgacatttgtgtttttttttcctactttaaataaacttaaattgtacttatacaataatgctagctttatatacaccattttctctaaattccatgtatcggagaatagtattattatcagcgttgagttacaagcatatacttttatcactacatgtgatttcattgaaggttttgtgcagattacactatcactagtatgagaacctacaagctacatgctatacatataatctcaaagtctgacaattgagttgttatatgtatgtccattgatatgtagataaaatgttttctaaacaaaatagaatgcgaccacgcaggctcattgaggctaaatctcctgatgtgttcattatttgtagtgcccttttggtttgttatgtttctctggccgtgccaatcgtagcaaccgacggtgtgtgtcaatcgaaccgagccggtcgccttgatactgacccgtgtttatttgttccagaaagcgcttgcaaccgggaaggaaaagcagccgaagaaatggccggtaaattgttcgcttgtgatttcgaagtttttggcatagtacaaggggttttcttcaggaagtatacgcaaaagcaggcaacaagcctggggctcaagggatggtgcatgaatacccgcgatggaaccgtcaagggccaaatggaaggggaggcgaaacccgtgaatgaaatgaagcattggctgcaaacgaaaggaagtcctaccagtcgaatcgataaagctgttttcagcgaaatgaaggaaatatcgaaatattctttcaatgacttttctgtaaaacgttgagtaaataatttaagattgtaataaactcctttgaataaattctttaaatgaataaaataatatcttaataaatcctcgagctgttgagtggaatacct

SEQ ID NO: 886 - DNA, 1032 bp, Aedes aegypti
gtgcagtttgtatgtagattatgcttaacgcaacgagtgcgatgtgaacccctattcgaagatcaaaacacttcgatggttgagttgatttgcgatctgacttcgttaaagattgaacatataccaaattctcccgcatcgctttgctcggagtgtaaaacatgccttgaacagtttgagtcttttcgagcaatgtgtttggcaaatgataaaatctttcgagatacttacattctgaacgataaacaggaaaagacggttgagattttgactgttactgaaaccggtgagcaacaaactgaagaacaggaatatttatatactaccatagacgagattcaagatgaagagcttcaagacaatcaaggcacgttggttgtagaaatagataaactagacgagttaaatagcgaaacggatgaatatgagatttattattcgaatccttctaaagaaattcagcttaaaacaaatcaaagttcttctgaagaagagcatccgactcaattggaatcaacgcctcgaaacaccaatggaagaaaactttgcatgatttgtaataaatacgtgaatcgattagcgcagcatcaactcattcacaaggaaattagaccattccagtgcgaattctgctcgaaaggattcaaccagatgagcaacctcaaaaagcacatcagactgcacaccaaagaaaagccctacctttgcaatcagtgtgacaaaggattcacgaattcgaccgagttgaaaattcacgtccgaagtcacacacaggagaggcctttcacctgtgaggagtgcgggaaatcgttcgtcacatcgggccacttggcgcgccattcccggtcgcacagtggactgaaaccatacgggtgtgacgtttgcagtgcgaaattttcaacttcgagccatttggtgcgccacaaacgaattcactccaaggagctaccctatcggtgtgccacgtgtgatggacggtttatgaggactgaatacttgagggcgcacaaatgtaatccggcggggacgtaa

SEQ ID NO: 887 - DNA, 1997 bp, Aedes aegypti
atggagtataattatcatgtagagctttttacccacacggaacctcgcttcaagtgtacccgctgtccgaagacattcttcatgcgtaggacattgttgcaacattcccaaagccacgatgaggagtacgaaagggagaggcaaagggtgtcgatggccgatcccaagaatataaaggaatgcgaaatatgtcaaatcccgttttccaatagacaaaggctacgacatcatatgcttacagtccacgaggagccgaagcacaagtgtgccaaatgtggaaaagcattccattacaaaggtgaactgaaccgccatgagctagttcatgcgaaaaatgaatcgggctacttgccaccacaggagaagaaaccgaagactgtcgtcgaaccagcgtcaataccgacttgtgagcaatgcaacattcaattcctgaacaaaagaatacggcatcatcatatggtaacagtgcactccgaaccaaagttcaaatgtccctactgtccaaaagtgtgctattttctaaatactcttgagcgccaccaaaaaacgcacagcaaaattggagcggagaagatgtgtaagacttgtgggttacagtttgaaacggcagcgaaaaagtggcggcatatgctaaatgttcatcaaataccacgctatcggtgtcctgaatgtgcagatccgttcatgtacaagcgaaggttgagacgccacatgaaacaccgtcataaaaaggaaatacctgtgatgtcgcacggtccatattcaatgctttcgaagaactgttcaaaatgtaatcttgagtttgccgacatggatgaaaagcgtaagcatatgcaggaaaatcatgcggaattattggtttggtgttctcaatgtccgaaagcgtttggccataagggttctctgcagcgccatgaacaacgtgtgcacggtgcactgccagttcgccaagtgaacgccattctcgaagcgaacgcacttctccaaccgaatacggtgtctgatggtccaaaagggcgtaatcgcacacaatgggcaaagaactgctgggaatgtggactgaaatttaccaccagtacacaaagcaatgctcacatgcgggagaaacatcaggatcgattgttcaaatgtttggaatgcccgagcacgttcattaacgagcgaagtctggtactgcacaatcgttcacataataaagtaccgcgaactgtcactgaaaagacatgctccaaatgtggtgtcatgtttcctaccaaatcagagaagtataaacacatgatggaagaccatgctgattccatgtataaatgttctcaatgtccaaaactatttgtctataaagccaaacttgagaagcatgaaaaaacacctcatgatacaatggaagagaaaccaccccagaaactggttgctgaaacggcatgttcgatatgtggacttcagcttgaaactcgtcccaaaaagagacatcatatgttaacggcccattcagaaccgaagtttgagtgttctctctgtggcaaacagttctattacaagcaattgctagaccgccatgaaactagtcaccggaaacaaaataaacgccttactgatgcaagtaaatctgacgccggattccggaccttgtcgaaggacatatctcagggaaggatttggacatggaagctcaggaacgaacggttttccggtgtaccgtttgcgattggtactacctgagtgaggaaggattgtggaaccatgtacagcttcacgacattcccgacgaaaagaggaaaagccacttcgaggaattgataacttccagtgtgctgtatgaatgcgaacaatgcaatgatcaacggctttatgaggaagatggctacaatcagcacattatcgaatatcatgatgagccgccaactgagcaagtgtccatcaaatgtgaatgtacggattgcggggacatttttgccaatcacgatctgctattacaacacgtcgaagaagcccaccgg

SEQ ID NO: 888 - DNA, 978 bp, Aedes aegypti
cgtatcagtttcagcatcctaatctggaatattgagtgtaaaaagcattataatagaggtaaaaatttaccatgtcgaagtttaaatccggttccgagtgggagaaaatagcccagggtatcgaggatgacaaaaaagacgaaatagagacgatggaagatttggaggagaagatgcgtatgactccgaaaaacatgtttcccagcaaatgggacgatccggacgatttgatcgaagaggataaaaatcctcaagcctccttggaacgattggccttgtgggctgccggagaagacaagctggacattctcaaggaagttttgaccaaaaagccatcggtcgttaacgcttccgatagagatggatatactccgttgcacaaggcctgttataacaacaacgtggaaatggccaagttgctgctccagtacggagccgacccaaatgccgaaactgaactaggatggattcctctgcattcggcgtgcaagtggaacaatgccgaatgtgtggctctgatgttgcagcacggatcggacatcaatgcgacttcccacggtcatcaaactccgctccacattgctgccagtgtgtccaacagccggagcacactggtaacgctgctaatggacgatcgaattaaggtagatatgctgaacgactcgaacgaaaaggcagccacccttgccaagaagaatgggatggcgtttccactgtttgccatgggacaatcagctttgaccgtggaaactggaatgatagattagtaagttttacactatggtcattataactaggataagttaggaagggtaattaaaatgtttgctggcataagaaacacggcctttgaatttgttaacttcatacaaaatatacagagctggaagcaactagtctttaaggggccagaagcttgaaaaaagagacaaagcaggaaccaagaaaagaaaaataatcccaaagaaatcaggaggt

SEQ ID NO: 889 - DNA, 905 bp, Aedes aegypti
aacgtatagaagggcaacgcctgatgcgatcacatcagtttatcgacgatagttgaagcggacggacgaaaaggagcagcagcagcagaacaacagtggagaaagcttctctgctccgacgatgaacaagcgggtggcacagccctctgttcgtcggagcgtcgagaaacagcagagtcgaaataaagctactctggtcacaacagtcggatgacccgcatagaaaaatacaactgttatggatgcagaaaaacagcgatgggacattgtgcggcctacggcttgaggaaacagttcaacgaaccgttcaacaaaaggagaattgaagacccggctaccgtttgggcaacaagaaaaataagcatcaaaaacgatttcaaaccacgtccgtggaaacatcttcctgttacaccgacggacttgtaccccggcagcagcatcaccagaacaccatctaagatataatcccgatccttgcttaatcattccgggagggccagtagacgaccgacgattttttgtaattttcgagcttccccgagcagaagcgaagttctgaccatcaaatcgagatattgatttgattgacataagagataaaagatttgaagataacatctaaattttattcctggaacttctaagccatatcaaaatttgatgtttgcagatcaaatgaatagctcgctgatattggttagatcttacaaaagctaaatatgatatgctaatgatattctaggagtaaattttagatatcattttcagatcttttatctcttatatctatcaagttaatatcacttttagatgtccatatcaaaattagctattgctgagattttttcacctgctcgggctgaatgctcaacggaaacgagcagtacggataatgaaaattctga

SEQ ID NO: 890 - DNA, 1712 bp, Aedes aegypti
gttgctttaggtcgcaggatcggattctacaggttttgtggagacattggtcgagggaatttctcacgcgttaagcttgcggtacatcagttaaccaaagataaagttgcaatcaaagtagttgatactagtcgtttagatgccaaagctcttcgtatgctttcaaaagaagttagcacacttgaagcagcattccatccatttattttgaggttatttgaggtgatagacaccataggaaaaatttacctagtaagtgaatggatacccggtggagaactctacagtagaattgtggatattggtgcactagaggaatatcacgctgctgttatattttatcagcttctcatagctgttaaatacttgcacagtttaggatacgttcatcgagacataaaagcagagaatattttaatgataaacgaagagagaataaagctcgcagattttggttttagcactcaattaatcaacggttcaaaccaacatttggatacattttgtggatcacccccatatgccgcacctgaattattcagcgatgatcactatgtaggaggacctgtagacatatgggccttgggaatattactttattttatgctgcatgcgaggatgcccttcaaaggatcaacgattccactcttgagaacagccgtattgaaaggagaatatgaaatatcgacatctcttagtttgtcatgctgccgacttatacaacgtattctggtaaattcacctttccgacggccttcaatggatcaattattggaatgtcaatggtttgaatatgtccaatcaccagttatccagaaaagtcgaaattgttccaacgcaacaggtgcggaaagtgatatcagtgaggttcctaatagacgtaaacaaatattttgtttgttttccactagaggccaatttagatttcgatcatccaaaaatgtaaacatcgtagctgccaatcaattccaaaccaccgtttcacaaataaacactagtaaatgtagtaccaaacgcgcaaatagtgtattagaacataattttttgcatccgctgagaacagaaaaaacagttgaagatttatcagaagaatctgctgctagtatagtaaaaatgcatagtgatatagacgacaactcgcaaaataagcggaaattttcttttagaaaagtagtaagaaaacgagttagtccaatagatattttaaatgaacgcaaatctaaaacaatcaatactgaaaaaaacatttcaaaacatgattttagaatcattctgcaggatttaatagtcggatggcatggaaagcaagtaatgtatccaagtttgaattcgagcaacattttaccactggaatctgaaacaaggagacttatggataaactaggtatatctgctgatatgctggaaaaaacaataaataatgggccacgtagtgatatattaggaatttacagaataataatgcaccgtcttcaaaaagaacagaccatcgaatgcatatcaagcaatgagatccaatccgacactaggaataatattagttgttctactcaaatgaaaaactgggaaaaaagcgtacacactaagcccaaaaaacaaactttgagtactgttacatgtgccatactataggtataaatagttgttaatgtattattgttcctcgttgtaaaataaactagatttttcatttctttgttttattaccaatc

SEQ ID NO: 891 - DNA, 1575 bp, Aedes aegypti
gtggttgaaaaaatgtccgacgacgaagagctagtgtacgtgaagcgtcccaaaaccatccactatggttccctggaggacacggaacggagccgccaaatgaaagactccggatccgatttatactcgggggccgggagttccagtgacatcattggccaaatttacacgtccagcgaatatttcgatctggagaatgaagtgtccaaggacaaggccgccctgctggaggaattcgagcgaaagaaaaaagcccggcagattcatgtcagtacggatgattcggaagtgaagaaaaacttgcgagctttgaatgaaccgatttgttactttggggaaggccctgcagaacgacggatccgtttgaaagaattgttggcctctttgggtgagagtgccataccgcaaaagagtggtaaggaggaagataagaaacagcaggtccacaaggagcaggaatcaacttggtatcacgaaggaccggaatcactgaggattgcacgaatttggctggcaaattattcccttccacgggcaaagaagcgcctggaggaagctgccgaacagctgcagcttcccagtgccacaaaagcaggtcgaatggtagagttgcagaagcgtatccaatccttagctcctctctgcagtcaggttggggacgtgcggccaattaccaactgtagcttcaaccacgactccagtctgctgttgacctcgagcttgagttccatgtgcaaggtgtggtcggtgccggattgtaacctggtgcaaaccttgcgcggtcatcagttctacgtcagcgccattgccttccgggacggcattgcaacggactcaaaaggggaagtggccatggcttccggttgttacgatggaaccgtaaagctgtggtcattcgatagcgaagaatccatagcggacattaacgggcatgtgccacatcgtgtgtcccgtttggcgttccatccttcgggacgctttcttggcaccgcatgttacgattcctcttggcgcctgtgggatttagagcagaagcaggaagtattacatcaggaaggacacgctaaagctgtccattgcattgcgttccaagtggatggaagcgtgtgcgtcaccggaggtttggacgcatttggacgtgtgtgggatcttcgaaccggtcgttgtattatgttccttgaggggcacctgagtgccatctatggtgtggacttctcccccaatggataccacattgcaacgggcagccaggacaattcctgcaagatttgggatctgagaaggcgcaaccccgtctacacaatcccagcacacacgaatctgatttccgatgtgaagtatcagaagaacggtggccacttcttggtgacgtccagctatgataacacggcgaaaatttggtccaacaagacgtggcaaccgctgaagaccctgtcggggcacgatagtaaggtgatgagcattgatatttcacccaattcgcagcacatcgccaccacttcgtatgatcggacgttcaagctgtggagccctgaatgagttttggtttggaaaataaagttttgttcgataaat

SEQ ID NO: 892 - DNA, 1850 bp, Aedes aegypti
atgacgttgttcaatctggaacagtttccagacgtgtgccgcctgtgcatgaaggcagattccaaaaaatcccactcaatacatgataattttgaagcaatcccgatgaagatcgtagcattcctggaggaagttacattccgcaccgcggagaataaggctgaacttctgccgaaatccatatgcgatccttgtgtcaactacctgtcggagtttgccgtctaccggaataggatggcactcacgttccggttcatggaggctctagttgatctgaaacaatccaacgctaaaccaatcaccgcccttttcaaagatagcaagcgcgaactggagtcacttttcagggagctttctatttgcagcaaaccggatccacaggtcgaagatctgctgctggagtttgaatcgtacaactcggtcaactgcgatgctctcgtcaaagtggagatggagcaaggttccgagccggacgatgatgatgggcacgatgatgtccacgatgatctcgatgatcccgattttgaatgcgtcgatgagccagaagatgaagtcgaaacaaaacccagtaaaaaaacacgcaagaaatttcattcaaaaactaaatcaagtgaattgtccagtgacgatgaaccgttagtaaaaaagaaagctaaagttaagtcccctcgatcaactggttctacccctgcagcacaaaacagcaccaccaaacgggttggtcgtccgaggattcatccggaaggaaggcatcttgaggaaccgtggtcttgcgataagtgcaaattcaaaacgaaataccgagtcgccgttgaacgccacaagaaggttcacgagcggcgtgagaagcgaatttatccgtgttccatttgtggagaggtgttcaagaccaatgatgaaatgcgtaaccatggcttggtgcatccggagaaccagtttgtgtgcgaaatgtgcggtgcatcgctgaagagcgcaacctcactgaagtcgcacatggaacggcatgaagacaaacgaaagtattcctgtcaatattgcgaatatgcagcctacacgaaaatcaatctaactgcacacttgcaaatccatgcctccgataatgccgtgctgaaatgcgaaatatgtggtaccacgttccggaaatctggccatctgaaacgtcacatcgagagccacagcaacgaacggaaatacgcgtgtgaacagtgtccggggcggttcaacaccaagaacacgctccgaaatcatttcaatcgcgtgcacttgggcgttcgttacccctgtgaatactgtgaaaaaacattcgaccagagaatcatcctgcgagatcacatcgaacgagtccatcagattcaatgccaatttatatgcgacatttgtgttgttacgttcgatagccaggagaagttggatatccacaagcagcgccatgagaatcccaagcctatggagtgtggtatatgcctaacgatacaccctacccaggaggcattggccgcccatatgtgcatcagctaccaggacaactatcagtgctgcaacaaagatttgcgcaaccatgtgcagtacaatcgccacatgctggtcaagcatggcatgaaaaccaatgttcgagtgaaacctatcccgggaatgctgttgggaaatttgagaggatcgcgaaagcgtctgatacagtgtcgtaagtgcgatattgctttcccttcgaaagcgctgaagatgcaacatatgctagtgtgcaaccagacgtcaagggaggaatattcgaatgacgctgataatggtgtggccgggcgcttcggttattagactagatttgaataactagagattaatattcataagtgtaa

SEQ ID NO: 893 - DNA, 1055 bp, Aedes aegypti
atgcaaaccatctatcggctcagcagtaaaagcctgatcagtacaatcgttgactgccgatcaatacagtacggtcctcatcacagccatgctgtgccccgcgcgcgtttgccgcctttcgcaccctcagcccacagaacgggtctgggtaaaccagaaatcaactcgcgtcgcgaactgtgccgaacttccgtcgacccgtcgaaacacgtcaatattttcctgatcgcgcacgaacagcaggaaatcaaagcgctaattcaatatccgatccaacaactctctaaggatgtatctttgttgctatccgccgttcatggcaaaattaaggcgttgaaatcaaacagtagaggtaaaaatcatctggaaatagttttgcagcaaaacatggagaaaaaactgctgatctcattaaaatgtgcaacagtacgagtacaacagaatcaagcaagatttaacgataatcaaaacaatatgaagcataatacagagctggtttttggcgatttgccagtacttaattcagttgacactttcgacaattttctcaacatgaatgtaacaacatcatcgaagagtattccagatgacaatgaagccgaaacattggacgaatatttccaactacccgcgacaggactgaatgtaaatcagaaacaactaatgataattgaagctgataactctaaaatgattagaactagagaatatgaagtgtcaagaattgttgactcaatagataatttgaatgttgtattcaaggatcttgcacacatagtaatggaacaaggtacaattttagataggattgattataatattgaatgcacgcaaactaaaattttcgagggatatgaacaacttaaaattgctgaaatatatcaaagaaaaaataaaagaatatattgtatatgcgttttagcgagcatgattatgttcatgataattttaacaatgttcactaaattataattttttgtattataaataaatttcagttgttttgttacggatagagaagaggaaccattaacatgaaatatatgaataaatgg

SEQ ID NO: 894 - DNA, 749 bp, Aedes aegypti
gtttatagaaatcaccacaccggcgaaatcggactgaattccagttaatttcaatttcgtttctacttaagaattcgcaatgtttacccgatatagcactcgaatcttcaccaacaatactgtgctccgacggctgtattgcagtgaccccggtcgcatcgaaaaaacggtcaatagcgtaacgttgctgggccgcgtcggagccgatccgcagaagcgtggcaacgatgcccatcccgtggttacattctccctagcgacacactccaactatcggtacgaatccggcgactggatgcagaaaaccgattggcaccgggtggtggtcttcaaaccggccctgagggatgccgtcatgagctacctccggaagggccaacggacaatgatcagcgggaagattacctacggcgagattacggatcaggagggcaaacagcgacctaccaccagcattattgcggatgatgtaatcttcctgcagaaccagaatcagtagcatttgttatgtttccatgaagagtagtgtttgtttgcgtatgagtcattatagtttcatttaccaatacgattatctcgcctttagcatcaggctgtatttagagaaacttttttttttccaaagaattgcattgaatttaaaaccatatttatcatgaaccagataaatacaaatcacgtagtatagtagaaaagtatcaatcaacatgaataaaacctctgaattaattcatacagggcgaaaagaa

SEQ ID NO: 895 - DNA, 2386 bp, Aedes aegypti
caggtcctaacacgtggtgtaagcggagatgtctacaatttggccgattgcattctgcagcaagcagttgttggatccggcgccaacaccttgttcctatcctacctgaagcactcgttgtgcgcccacctgatctcacacgcggccgtgctcaagcgcatctccaagtacgatcacttcgagatgcaccactgcttgatcgcgttgctcgagttcctggagtcgatcatcggcggcgtgacgtgccgcggcaagcaggaggaaggcctgctgaccaaagcgatgctctcgctggtctactggttgatgcagatctacgagcacgcgatcgagacgttcagcgagaaccgatcgctcaccaccgaacagcaggaagtggtggagaaaacggcgaatgtgctggagaagatcgtgcagagtcagttcttgttgggggtggttttcgtcgggaaattcgaggacccggaactgtttggaatgctggcgaagaaatgtctggagatcgagaatctgacggtgaagtctgggtttgttccgccggtggttagccagaaaaatgtaacggttaacgactacattcggaaggtggctagtattgagacggaaacgttggagattaaggaattcgatgggaagggtgtggaaccgatcacctactgcatgcagccattgatcgcgatcgatattctgttcaatcccaactgcgacacccagatgtatgtgctggagttcctgtcgatccaagcgctgaagggttttccgctgtctaggctgtactgcgagattatccgcgcttgcttgacatgcctgaacaatgtgagcggaacgagcagggaatcgtacatctgcgcgttcacgttcatcaaagtgccgcagattatgcgtcagattcatctacaaacgagagtgcttaccccgaacgactttgaagatgctaagctggattactcgccggatgtcgtcgaggcttttgagctgcttctgcaggattccgcaatcttggacttcatggatgccaagtgcgcttgcaatacggtggaatacttgcttaacgagatgctcaagcaccacttgatcaacgagaagtactcgaagctgatcgcagccaagcgggatgggataaccagcagtttgcagaagctcgatttgaacactaatcagcattcgatagtgaagtttgttctgcgagcagagcctcccttggtcggtattctgaagaccctcagctccgattacaacaaggttcaggaggccttgctcgggatgctttgccaggtgctgtccggtaacagtttcgagctgattctgtccgtcgccaccgttgaggggaaactcaaaaccttcgtcgcgggattgatcaaatgcaacgagaattccaagcaggtccccggggaaatgggaaaacctgcgatgacccgggcagctctgttcgacgtgtccttcctgatgttggtcttcatcgtgcagaattacggttcggagggggtcctgaccgacggcacggattctttcttcgagaaatgggtccgagaatgcatggtagagaagcacaagtccaaatctccaatgaacatggtcaagctctgtgaccagaataaggtcgatgagctcattgtgagtctgaattctccggacggcttgaaggcgacttccctcaaatggcaggaaatctgcacaaacattcctggtctgctctatcaggtacttctcgcgtgggaaaacgaaaccctttccacgggggagatcaagaagttcctggacagcctcaagtccaggttctgctgtttctcgatttgtgccacgtcatggctgtgcgcttacatgcaaataatccgtcaggatgaacttctgaaaccgatgaatatgattcaacagttcgtgaccaacatcagctccgaggagatgatgcagcaggaatacctgaaggaacgccttggactaacggtgcagatcatccgtaagatgcagatcgacttccaacgactgccggtggccagccccaagatgagaaaccagctgcagtcgcagagtttggtttcgcaggccccgctggaagagcagttcgaagaagtgtggaagggagtgctggagaagggctggctgccgatcgaggcgacgctggcgctggagaatctgctgcaatcttgtgggccgttctggttggtggataagctggtgcagcagatttttcactgcaaatatatcagggagatgaataaaactatggatatcgtttttgcgatcatgcatttggatatagaacgttgtactattgcgctgctctctcagctggtcccgatgatgctgctcaacaagctacagtgagtatttgaacaagttaacgaatttctttttttctctctggctctctggtccaaatggaaca

SEQ ID NO: 896 - DNA, 1423 bp, Aedes aegypti
agtttaatttagttttatcaaatcatgatgatagtgttgcctaacacaatacgtagatataaaaacttaatgtaatattcgaaataatacttataataaaagaattacaaaactagcaggtaattaagttcgaaatttgataattttgacatatgtaaggaatagccaatcagacaagctttagaaaatgattttaattatatggttataacttaatggattttaggcatggattgttaagtgtgttttcatactcccatgaatccatcacacggagtagcgttagcagcaagttatgtcagctcaatgtgatggatcattgatgtcagctcttacgatgacggtgtatcgaatttaaatgcctttacatgcgcatgtgtttgtaatgctacagctgctgcttacgacattgacacgctcagaacagactgatagaattcggtaagccgacagcgaagggcgtagcagtaaacaaatctatcccattagtctgcataccgaaagatctatcacatcaaccagatatcggaaaagaaagaaaacatagtgccattgatttagttcaattagacattcacagtcaaacaccacgaccattccaaactagaacaatcattcatcgatagtgtgacatccatgagctgataagagaagtccacagacagcatttggttggttggtttggtggtgcttaggaagaggctataatcgcattcacagatagtgcgtacccggaagatgactgctgatttggagttgatcaagaagcacataggagagtatcctgacttccccaagaaaggaattctgttcaaagatatcttcaccgccttacggagtggtccggtatgtcaggctctgaagcggctcataattgcacacattcgtgccacctgtccggacgttcaggtggtggttggactcgaagccaggggttttctgttcagtttaatgatagcggctgaactgggaatcgcatgcgttccgattcgaaagaaaggaaaactacccggtgaatgcgtcaagtatgagtacaaactggagtacggaacggacgtgttcgagatccagcagggtagcatattaccaggtcaaaaagtgttaatcattgacgacctgctggccacgggaggaactatggatgccgcgaacaagctggtgcagcagattggtggcactgtcgagcagaatttggtcatcatcgagctgaccatgctgggagggcgcgaaaaattgaaagcttccggagttaaagtacattcctttattcagtacgacgatgtcgagtagctagaaatctttaggttcagaggattcagctatcaactgtcagattctcattctacaatcaatgttcaaattatttgaactgttgttggacgttgtttatgttgcaaataaataaagcttatcaaaacacaaa

SEQ ID NO: 897 - DNA, 665 bp, Aedes aegypti
cttctcaggttgattcttcgggaaaaaagtctgaaagttttgaacacatgcatttatcgaaagcgataaatctctgaataactctaatagtttattaatttcccatcaaaccaacgaggacatcgaacaaacatggatttggaattgaaaaaggccttctccgagatgcagatgaacaaaatcgaatcgaccaagaaaatccgcctgctggacatgaaaacggatagcttgaaggtgtccaaacagcgagtggagctaaccaacaaggaaatttcccagctgaatgccgataccaaagtttacgcctcggtgggacgtatgttcgtcctgtcggatgttccttcgttgaccgatgagatgaaaatcaaacagagcaacttcgaggagatgatcggccagtgcgagaagaacaaggaatttctgctgaaaaatctcaaggagcaggaggacagccttcgggagctggtccagcaaaagcggacagaatcgacggcgaaggaaaacggcaccgaggcgaagaaggaatagaattctagacatataagttagacgcgattcaatgcatttcggatgattgatgataaagaatggatcgtaaagcatcattttttgtaacgttatctataacccgataataaaactacaccttttctgataacacacta

SEQ ID NO: 898 - DNA, 2270 bp, Aedes aegypti
atgggtataaaagatttgtggaatttgctgacgccgcacagcgaaaagaagtccttattccacctcaatggccaagtggtcgcaatcgatctctccggatgggtttgcgaaagtttaaacgttgtcgattatttcgtccacccgcgattctatttaaggaacttattcttccgtacttactatctgctgcaaattggaatcattccggtatttgtgctggaaggttctgcaccgcctctgaagtatggagtgatcatcaaacgtaatcaaacccagttccgaggagttcccccgaggaaaacggccaattgtgacaaagcaggtgggacgcagaaaccgaacgggacagaatctaaggcaccttcggaacaaaagaggaaccgttttcaccacgtgctgaagcaatgcgaagagctgttgagttcgatgggtttggtttgcgtgcaggcaccgggggaagcggaagcgctgtgtgcctatttgaaccatgacgggatggtctatggggtaattagccaggactcggactgctttgcctatggagctgttcgggtgtttcggaacttttgtgcttcgcagagcggtggaggatcggtcgatgtctacgatatggacaagatccgaatggtgatggatttgggacaggagaagattgtggcgatgggaatactgtccggatgtgattacagtccagctggagttccaggagtgggcagggagatgatcaatcgattgctgaacatttaccatagcagggatgtattggccaggatacgatcttggcgcgctacagcagatcgtcttaccgagcaggaaattaaggccgaagacaaaaacgtctgtgcagactgtggacaccaagggaagacgtttgtccaccggagggccggctgtcaggactgcagaaccaaagtcggatgcgatgagtccagatggaagaaccaacgggcgaacattaagactgagttggacatcaagagaaaggcgctacaagacccggatttcccgccagaggcaattgtgagtgaattcatggaacggaaatgtgagctgcctccgttggatttggagtggaggcaaccgaatattgttaagtttattcgcaacattgccaatctcctgcaatggaacgaaatctacagttttatcaaattgtttccgcttttcacccgttggcagttgctgacccttagaagaaatccatcccgtggcatcagcgttaaattggaaccggactacatcaagaagaagcgatcaccgaaaggagtcgccagcttcgaaattatttggaaagatgacggatcgatcttctccggactagtcccagatgatcagctgcaagcatttcttgatgaaccgggtaacaccgaagagtctctatggagtactatcgagccgcaagacttggtttccgaggcatacccaagtctcgttgaagccttcttgtcgtcgaaggcaaagcccaaaagaaaaccgaaaaagtctcctaagaagcaatccggaacaaagactgtcaggaatacgaagcagaaacgattggaagaacttatgaattttgtaacaagtgacgctggatcacaactggaagaaccagaaggagaagccctgataatgatagaacctgatgatgaacctcaactggccacttgtaccgattccaaggagaccatttccgagttgaacaaaagcatcgccgacatgtccgttgactccgattcggattccatttattgggacctgattgcgaacggatcggcatgggacgcagattatctgaatgtctcggatgtcatcgatcgcgtttgccatccggactatggacgtgtcccgttccccgatgaggatgaagaagataaaagaatcaagcaattgattgccaaggccaaagctatgaagacgttgctctcgatgagtgttcagcatgcagccttggacgatctttgccttgacgaggaaccggacgagccaaacgccgttcaacacaagctacttttgaagcaggacattctcggcagggaacccgacttggcgaaccaatccctgctgaataggtcggtgaagccccgtaaacgaaaaagtttctttttcgagtcgattgatgtgccacctccggaactgcaggacggttacaacgagatggacatgtttgagtgttccgttgcgctgaaggatcaatttgtgatgccggtttcggatgacatgaatcgaaccgttgtctacgatctggatttttagtgtaagtaatgttattatattttactcgaaatcga

SEQ ID NO: 899 - DNA, 1071 bp, Aedes aegypti
ttccacagcgttatgctcagacatgcatccagctctaaccgaatatgtgataaaattgttacagaaaaatcgaatccacaccgtatacgactttgccaaaaccgaagacgatcgcctgatgcgggtatcgaatttatcatacgaagaaatcagcttcgtcaaaaaggaactaacgtcacgtttttccggcaactgcatccaagttgtggaatatttccggtatctggaagatttggtcgaaccgcttaaaaccggaatcagagggctggatttactcctagaaggcggactgcttccaggccatgtgatggaaatttttggagattccagttctggcaagactcagatttgcgtgacaatggcagcaaatattgcccgtaatcataaatttgatgtattttacgttgatacgaaatgtgacttttttgctaggcgaattcacaagatcttggagcttaataagtgttcagtacaagagattcaagaaaccatgggcagaataaaagttgagcggatcttatctccagaaagtttgataaaaaccatggaagatcttctgattcgtgtggacgatttaaagaacttcaaagtgctaataatcgattcattgcctccgctctggtatcagtatcagaacacgaagagcagatgctatcctctcggaatgctaacccgtttgattgggcttttgaggaagctggcaacggagaatctcatatccatcgtcctggtgaatctcaaaataactgcctatgattcgttttctaccggtggtggtggatcgaggagagcaatggccaatcagagaaacagcaatgaatatccggcgttgggacgcttctgggagacggccccgacgacgagaatcttaatgagcaaaatcgaaagcaacagttcagggccggaacgattgctggcgatttggaagtgcagttttttgaaatgcggagatcgacaaatggtgacaattaccgatcgtggcgtggtctagttctctgaattaatgttggaagtatttagtaagaatatcactcttatttcataaatacaaattagggattgttgattctt

SEQ ID NO: 900 - DNA, 823 bp, Aedes aegypti
ttttcaaaagtaactattacagctggaattcgcgttcgaatagctatgggttcagcagcagattttataccaatcccgctgaggtacgaagatcaggacaccgcttgtcatcaggtgcttatcaaggaaaatgtttccaaggcgatccacaaatcgaaaccagccggtaggacgttattcgtgttaaatgttccgccgtatgcaacgccagaatctttgcaaacagcttttagcataacaggcaaggtagatcacgttattctacaggaaaaacctgccgaggaacatgccattcaaaacgatcagtcggaaaacagattcaaggttgcctacgtagtttaccaacaaccgtcatccattaagaagctgttgcgaatgcagaagttaaatgcccttaatgcagatggccaacttctgacgggcatcgaaaagtggaccaaggcctaccaggagcgtatcccagatcctgtattgatgcagcaggaaatcgacgcatacatggtcaattacgatcgccaggttgcccaagaaaagacccaacaggaaacggaaccggacgatgagggttgggtcacggtaaccaagtcgagcgccaacacgtttgtgcaaaaggaggcaacggtcagcaaattagaggacaaattaagcaaggatcgcaagcacaaggagctaaagaacttctacacgttccaaattcgcgaatcgaaaaagaccgatattgttagcctgaggaaaaagtacgatcgcgatctgcagaaaatgcagcaaattaagaagacgaaacggtttaagccttactagatgttcaataaaagttatcagt

SEQ ID NO: 901 - DNA, 1150 bp, Aedes aegypti
aagcttgcttggaaacacacttgttttaacatacgcctcgtcgcgtacgcgtatatccttaacaaaggaaaatttataggtgaattagattatttccaccgacgctatcaacatgtctccaaaagcaccgatggtcaagttgaacaacggtctggaaatgccagttctcggccttggaacatggctgtccaaggagggtgaaggcgtagaggcaatcaaagcagccatcgacgcgggatatcggcacatcgatacggcctatttttaccaaaatgagaaagaggttggcgaagctatacgcgccaagatcgaagaaggcgtagtttgccgggaagatttatttgtgacgacgaagttatggaatacctatcaccatccagaccatgtggaacaagcgttccaaaagtctttggaaaacctgaacattgagtatattgacctgtatttaatgcacctgcccatcgggtacaagtttatcgattgggataccaaaaacttgatgccgtatgatgcggatggaaagctgcaattctctgatgttgattatatcgacacctggaaagctatggaaaagttgttaaaaacaggaaaggttaagagcattggagtttcaaacttcaacagtgaacaaatcactcgattgcttgccgaatgcgaaatcaagcctgtaaccaatcaggtcgagtgtaatccaagtctcaaccaacgaaaactgactgagttctgtaaaaacttggacattactctgaccgcttatagtcctctgggtcgtccaaattattacgagaaggaccccgacaacatgccaaagcctgctttggatgatcctaaggtgattgagatcggtaaaaagtacaacaaaacgtcgggccaggtaatcctcagatatttggtcgacattggaactatcccaatcccaaagtcatccaactcggaacgcattcggcagaacattgacatcttcgacttcaaactgacggaagaggaaattaaaattatggatggattccatactggacagcgtacggtaccgttcaacctctgtaccagtcacaagtatttcccatttaatgctgaattttaaatatagatcgttcttgtaatggtatcaagaaataataaagaagaaaggttttgactgtgttcaaat

SEQ ID NO: 902 - DNA, 950 bp, Aedes aegypti
aagatgctgacccagtcgcagttctcgcagattcagttctccgcggtgctgaacaactacaccatgttctacaatgtggccaaagccataagcttcgtcgatcatgcaacggttcaactcagcgccgatggcgtgaaggtagtcgtcgaagattgcaagagtgtccaggccacggcttacatcacgaaggcttgtttctcggattaccaaataggccaacgaaagcgcaaatcgaccgcgatggaagacgaccgtgaagacgcagacgacaacgaaccgttgacctcgttcggtctcaatttgaaggtgttcaccgactgtttgagcatgttcatggatggagattacgattccagcatgaagatgctgcacaagggcgagggagctcccctggtggtgattttggagcggcgctgtgaagacgaccttattacggagtgctcggtgcgaacgatggaagcgcaggacattctggacttcgacttcgaagaagaacacgtttgcagcaaggttagcatcaagggtcaggaattcttcgctctgctgtccgagatggatcggaatagtagtgaggtggaactgtttctatctccagacgcaccgcactttaagttctccacattcgatgagctgggatcggagtccagttttgaaatcacaaacagcagcgatatgctgatttcgtttcacagcacggaaacgactacgaaccgatatcagtttgctcatttcaagctggtcatgaagactttggcgtttgcgtcgaaaattgcgctgcgaactaacaaggaaggactgctcgggctgcaggtaatgatagagaactccgaaaattccaacatattcgtcgaatactttgtaatgccactgtgcgatgtcgaagcaaatgaaacttctattacatatgattgatttgtttcggctggaaaaataaagtcttataaagagtc

SEQ ID NO: 903 - DNA, 1434 bp, Aedes aegypti
ataacaagttctcaaacaaaaacaacgaaagtagttgattgtttttcgtaaatttcaagttttaaatacctcccgcctgcagtattttttggtgtgaacggaaaaattatgtaattgaaaaagctatgcattcaggaaaagtacaattcaaaccagtaagcagtaaatcgcaccaacccatcgagtgtcgcttctgtcggaccacggcgaccaatgtaagtgtggatctgttccagcatggcctcgctcaaaaggcggagaagtgcttctatctttcgattgatccaaccgatccactgcccaagaagatctgccaccagtgtaaagcttctctctgcgcagcgtatgcctttggggagaaggcccggcttgtggagaaggaactgaaactgaaatacggggaagccacggacgaggatttcttgaatgtcgaatacctccaggacgaggtcccatttgagtacctaacgtacgaatcggatccggttggattagcactggagaaactgaaggacactgcaatagttattaagaaagttccacccaaagaagttccgattgagcgattgcaggaatcgaagcgaatggatgggagtccagatagcgatgaagattgtgataagggagaaccggcaagaaagtacagaaaattcgagggggaaatcgttatcaacctgactggacctgtgccttgcatttgcatgtgctgttcaaaaacgttttcctccaaggaagaactcttgaagcataaggatgtatgcggtgaggacagttacatttgccgaaagtgctgtacaatttgtgacagcctggcggccctgaagaagcaccagcagacgcactacgattacaagtacaagcacaaatgcccatcatgcgagcaaatcttcaggaacaccttcgccttggacaatcaccgatcgaaggatcacggcgaggacattgaagagcgaggatatgtttaccggtgctgcgataaagagttccgcaccaggaaagcactccacgagcatgccgaaatacacgcagagccaccgcttgaatgcgccgtttgtggtatcaagtccaagaataagcacaccctgaggctgcacctccggatacacgaagactatcggccgtacgtttgccaggactgcgggatggccttcagaaagaagaatatgcttttccaacattcgcaaatgcacgctggagtgcagcttctcaggtgtgattactgtccgaagcagtttggtaagaaggagtcgttgaagaaccactgccagcggtatcacccgagtgaatcgatggactttaaaggccttaaactgggacagacccggaaaaggatagcgcaggatcattcgtaccaaggtgaggtcggaagggaggaagaggtcaaaacggttgaataatgaatgatcgtcaaacaaagtttgaatgtttgaaagt

SEQ ID NO: 904 - DNA, 2381 bp, Aedes aegypti
attctgagtttttgttttgatttcacgtccactttggcagagtgtttatcgcgttattatcgtattttgtatatcgcaaattcttcaaaagaaaatgagatttcctccaactttggtgggcttcccgagatacaaatctaacggtaaatcttagatttcatcccggtcaaaatgatagcagtaagtagcgagagttttccatccccgagctgtaatcgaaatcgtcgttcgtccaaaagccgcactaatcactgaaggcggctaacagttgctatgcgattctgcttcctgccacgactgaccggaacattccggcttcggtgctgctgcttggtaaccatcctggcactcatcattttatcctactatttgatagcagatttgatattaacgcacacatccaacaccaaatgcgcaaaatgctacgaacccatcgacgtggtttatacttgggtcaacggaagcgaccagcgattcctggatcagctgaaactctactctctggttagggacaaagctcgctacgacgacaaaaacgaactcaaatactcgttgcgttcgcttgagaagtttgcgccctgggtcagaaaaatctacattgtaaccaacgggcagattccattttggctcaatctggacaatccgagggtgcaaattgtccagcatgctgatatagcggatgaggacgccgtgctgccaacgttttccagcgcgaccattgagacgttcattcataaaatttcgggactttcgaagaactttctatatctgaatgatgatatatttctgggcgctgcgttgttcccagatgatctgataacgctttccgagggggtgaaggttttcacagcttggcaggttccggactgtgcgccagattgcccgtggatgtttgtcggcgatggatcctgcgatagtcattgctatgtggaggagtgccaattcgatggcggagattgtgaccatccggactatcagaaccatatgcacgagatggaagactacaatatgtccccggaggaaggcgaagatacgtttatcgatgtgccgaagacgtttcccaaaaatgggaaaaagtcggataacataagggacatctatgagatgtttaaacgatccaatagttcttccacaaaacagctggtcgaaaagttcaacaaggaaaagcttaaaagcaataagtcgagcgcaaagaaaggttccgctcaggatcatgaccgggagctgaaaagcgaagagaagatgtccaattcgcaggatatatttgcgcattcgctgattcatacgaacaagatgttcaaccaggtgtacgggttcaaaaacaggaaagtcctagctcacgttggattcctgctaaacgtgaacgtcatagaggctatgctgattcgattcaggagggaattttccgttaccaaaagccatcgatttcgggagaagaacgatctccagtacgccttcacgtactaccattttctgatgagcgaaagcaggaacaagagcatttcggagatattcgacgatttcgatacggatgggtctggcacttggtcagatcgcgagattcgaacgctactcacgaaaatctacaacctgccgctggattggtcggcagtgcggtactttgaggaggtcgttaccaattgctccctgcagcagaataacttcgtgccgctggagcaccaggaagagcagaggctagtttacccaaccctggtgtatgaacgatacgaagactctactattcccacggtcacgaaaagtcttgtattggcatgccgcgagctgacggacatgatgaagatgaatttcgcccaaactccactgtacaaatatcacgttaatcaaaagacgggaatctacagcaacttcaagatgctgacttcaaacatcacgcaggtcgtcgatgctttggatgaactgcgcaagaatcccaaaaagttcaattgcatcaatgacaacctctcggaagacagtcccgaggagaatcaactgatctcagctctcctggaagatttctacctctcgctctttccggtccgaagccagtttgagttggaaaacaactatcgcaatagatttcaatactacgacgactatcgggcttggtttgcccggaagacaatggtccgaaacggagtatacgctttttgcctgctagctttcttcatttgcgttaaaattctctgcttccgacataaaggcaaattcgcccgaactctggtgttccttagcagtcgaaccgactacagtaccatatgacgacgattgcgcaattgattggagaaataagttatagtttcgttttacaattatttatttgaacacgaaaaggtaaaacctgacactgaaataaactcttcaatgaacaaacaatctctcac

SEQ ID NO: 905 - DNA, 1884 bp, Aedes aegypti
tatttttatttctgagtgtacctagtccgtcgaacacgtgttaccttcattatatatttatttttcatatttaatcgattatttggaaatttaaacatccttaacaagcaaacctcccgatgtcatgtcacaaagaaatctaatgactgttgccatcattgactgtttgtttatgtttcaatcatttaacagtttttaaactcacaccatactgaaccgcagctgaaattcgacgatggatttatcgaaccgttgccgcggttgcctttcgaacgacgaggacactttgcgtcccttattggaggacaattcaactatccgaatgtttgaaaactgcgttggactaaaggtgcccacgtatcccggccttcccagaaatatctgcgggacctgttatgggaagtgtagctcctggaacaaattcaagcaacaatgtttggaaacggatgctctgcttcagttcaaattcggactgctgcagaagacaaagcaggatgaagcggaacctgaaactaacgaacagaaatcgactggtagtaacgatggggaaccgttaccggaaccgctggtagaggaagtaaaggaacaagaagaatacgaaatcgttgagccaggggaaatggaagattccgttacaggagaactacaggagaatggagaagaaaatttgaatcaggaaatcgagatagaagtaacagatcagtatgaagtaaaggaaactgctttagaaggagaacctgaggagtatgaagttaaggaagctattcttgaagagttttacttatcgggagacgaccaaatattggaagatttgggagaagacgtccaggtggaaatagttgcagaggaaatcgtcagcgaggagaatggcgaacagcagacgactaggaaaaggacagattacaattgcgataaatgtagtatgcgattccgaagtaaagagcgctttgaagcacaccagcgagagcaccaaggtttgaaaccggaagtctgtaaggtgtgcaacaatgaattcaacagtactagggcactttggcgccatatgcaaaagcacgctgacatcaagaagcacgcatgtaaagattgcggaagacgttacaaatatgccacatccctaacactacaccgcaagtcccatcgtaacgaaaggttgcacgtctgtgagacatgtggtaagtcattcttccgagctcatggtctgaagagccatctcttgacccacacgaaggaaaccccttttgaatgcgataaatgtcagaagcagttcaaaaataccaccatgcttagaaatcacgtgattagagttcatgaaggaactaaaaacttcatctgctcagaatgctcgaaagcttttgccaccggagcagagttgaaaattcaccagcgaagtcacacgaatcaaaagcctttcaagtgctctgcgtgcgacaaatgttacaaaacccagagtcatctcgccgtgcacttccgggcagcccacacgagcaatcggccgtacgcttgcgatctttgtccgcgaacgtttgcccacagtaaggttctgaagcagcatcggtttacccacgcaacagaaggaccttacaagtgtaacgtttgtgaacagacgttccgccagaagaaaacgctaataggccatatgagcaaacacgaaaggatgagcccggatcaggaattcgttgatgaatcggtcataaatcttccacaaacgataaatacattggaataaaaattgtggaaatcaaagcattttgaattaactttcttccaaagggatttttaccgtctgccgctaaaataactgttctacttttacactaccgtaattttggggtgatattgatcattttcacggtttatggcaaacaacttaatgtaggaaaacaa

SEQ ID NO: 906 - DNA, 1912 bp, Aedes aegypti
ttccagcagcgccgtcacaagatccccgttccgtccaactaccggtacgcatcgaagatcctccgccgcgtcgtggaggaacgctgcaacgtaaaatcgttgattctggaggaacggcacatccgcaagggcaagggtctggccatcatggatctgatcctggtccatttgaaacagatcgacgagctgttgaagaggactgaactgttggtgaaagaaccccgtttgaatccttggttggccaaggtgctgatcgcggagttgatcttcggaaggggagatttgaccggggaatcgcttccggtgcagtgcgtcaaacggtaccaggaggaactgaaggaagcactgggacagctggatgtcgcgccggccaaaatgctggatttcaaagaacctcgctacgtacgcatcaataccaacgttttggcgcagcccggtgccattcggctcctgcaggaggaaggatgggtgctggtggaggaagagttcgagaagtatggcgattttctggagcgggtcaagaaactgggcgactcggagttcatcgtggatttccacttcaaggagatgttggtgtttcccaatagtgccaaaaattactgggctcgcgcgatggagcttaagcagaaatttgtgctgcagaacaaggcctgcatcatcccgacctatctgcttaaccctccgaagaagagcgtggtgctggacatgtgtgctgccccgggtctgaaaactactcatctggccaacctaatgaagaacaagggtcgtatttatgccgtcgagcgggatgcaaatcgctacaagttgctttgcgactatgccgccgacttcggtgtcatcaaagcgatcaacgatgattgcatgctggtgggcgaggatcaggcaccgggagtcgaatacatcctgttggatcccagctgttccggatcaggaatggtcagccggttgaagctgaacgaagagtatgacaagcaacggctatacagacttggaggtctacagtacaaactgctttgccacgcaatgaacgctttcccatcggcaaagcgcatcgtctactcaacgtgttccattttcccagaggaaaatgaagatattgtacagggagctctgaagcacaacggccatttcaaactggtggacgccaaagaacgactgggcaaggagtggcacaatgtcggttcgaccgattatcccggaattggagaaaaatgtttgtacgccagatcggaaagtgacctcactattggaatgtttgtggccgttttcgagcgatgcgaagaggaagagtacaacgatgtgtacctggcacacgagaagcaaaaggaaagctacgaaaagctctctaaaatgggacacggcccggatttcggccgaggaaagcaggacaagggcaagaagcgaaagaagactcaagagaacaactacgaggaatctcaggatcagccacaggagagcaatgatacacctttggagcatgtgtcagagcctgtggatgatcccgaggttgcaccgaaaaagaaaaagaaggcaaaagataaaactatcaatgaagtagatccaccagttgcgtcaacagaaattgcaaacgatgacacaaccaacgaaacaaagaagaaaaagaaatctaagaaagttgcaactgacgttgaacagccaagtgaagaaatcgagcaagaagcgccacaagacgctggagagaataagaaaaagaaaaagaagaagcggaaacataatgacgaagaaccagaaaacaataatgaagcaaacgaggtagaacaacaaaccgagacgattgccgaagagatttctaagaaaaagaaaaagaagaagaagaaggatgagcaatgtgaagaagaatgaactgaattattcgattaatgtaagagaagaataaattcgaagcattttt

SEQ ID NO: 907 - DNA, 1126 bp, Aedes aegypti
atggcagcaatgtctgacctaacgctaacaacggttctcatagtggtgacatctttgctaccgcagagcagctgtcgctacaatggcaaatatcgggtcttgggaagctctccgatcgagtacatcaccacagccaacttcagcctcgccaacttacccaacgatccacatttggagtttcgcagatgccactttacttcgtttggaccggatatgtttgaggcgttgagcccatcgacaaagagggttacattccgcaaaggtacggtacgtgaagttctcataggtccaactacacggttggagagacttcaggttatcgatacgggtttaatagctctggaggcagcatctgacgaaccgaattactacctcaaacagttgaccgttcgttcgaggaagttttccgagtggtcacccagcttggcatctctgcggatgctggaagagattgatgtagcttattgcaatttgtcttatttgaatgtgcaatggttcgagaggtacaaccacctgaagatgctggatgtttcgaagaatagattgatggtgttcgatgttggaatgtccggcgtaccgacactggagaggttgcatctttgggggaatcatttggaggttctacaaagatttccggaagcatttccaaagctaaaaaaagtaactttggcacaaaatcggtggctttgccgatgggtggcgaatgtccgaggagcgattttttcgcaagatgtagagctgatggatatggacggggtttgtcgagcaggatggcagatcaatggtggattatgctgtaggagtggagaggacaagaaaactgctacttcccaacgaaaaaccaatgacaagagttcaatacatgttggacatgatttcattggaataaacgggtccgtgtttggtatgaaatggagaaacacaattgtttatgtgggtgaacctctgccaatattgtaaaagtctacaatttcacaaagaggtagtcagaagtattttgtagaaaagaaacctcagcttcctgataagtttgtttaggttaagttgctatataataatacaactacgcttatgtctaaaggtccaaaaaaaattatgaattaaaattattactgcacaatatcaa

SEQ ID NO: 908 - DNA, 1519 bp, Aedes aegypti
aaattgttgaccaaacattggaaagttttccgcagtttccagatgctgattctaggaaaattgtaaaaacagaatgttccccgcaccggaaaaacgtcgccagttgcgccaaaccgctctctgccgggaagtggaaaccgccaaacagcacgagagctaccacaaagatttcaaccaaattcaacgtaacagccagattagtttcctgaagcgccagaatacggcccagaggcgagaacgggacgaaaatgcccgacaacaggaggaagaggccaaggaagcaatcagacagagacagttgcaagaggaacaggaattggccatgcagttgcacgatgccaacaggcgtcgaatcaatgaggaaaaacttcgacaacagctccgggagtccaatcaggaactcagggaacttgagaccaaactgagggcagcttatgtggccaaggggattgccgcccagaaggcggaactggaagccagaaggctggaggagaagatcgcagctcagaaggagcaggaagtgctggaacagcagcgattggacaacttggaatacatcaaacagtgtgaggaagagcaatggaagcacaagtgcgagcttcgagataccctccacactcagatgaaggccctgcagcgccagaagcaaatcatgtacgaagaattccttcgggagaaacaatacctggacgaaatctgtaaacgtctccaggaggagcgattcgcggaaattcaacggaagctggaactgcaggagcgaacccgcatggagatggaatacttcaaggaggcgaaggccatctggcaggaacggcagaagcttgctctggcggaagaaaacgaaaggattcgacgctttttggagtaccgggatgctcaggagcgggagctacgggagcggaaagttgagagcacccgtttccgggaacagctcaacgagaagatggtcactgaactgcaggtggaaattgacgaagctcgcaaacgcgaagagctactgcaagatatatacgccgccgaactggacgagcgccaggaggatcgtattcagcgtgacttggagcagcagcttcgcaaacgcatcgaagctcggctcggtctggagaggcaactgatggagatcgaatgccgccgtcagcaggaggctgacgacgaacggaagttcaaggaggatcagctcaaactatgggcagaacgtgatcgaatcgatcaaatgaccaatgaaaaacgacggctcaaattggctgaacatcgacgagatattcaagaattgctggaggaacgtaaacgacggcgtgctgacgaagtgaaacaattgatgcagcaacagagcatgttcgagcaagaggagaaacggcgacaggaaatcatcgaagaggaacgcatcaaacttttgaaagagcacgtcactgctttgctcgggttcctaccgccaggggtgttacgcgaaagtgaccgggaacatattccgctgcccaagcctaagagcgaacagaaataaagccttaatttagtagag

SEQ ID NO: 909 - DNA, 1061 bp, Aedes aegypti
agaaaattaatgttagtatcagccttaataacttatggcgttttcgtttattgctggggcgaaactagtttcgccctaggttcgcactaacagctgtcaaaacgtttttttattggctcgggtcgaacccggatccgccctaggttcgacccaaacacaacaaggttcgctctgccgattttttgcgatccaacctgagcggggtccaactgtcaaaaatggattgtttacgtttttgtaattatcaaaattaactattgtagaaacatattagtaacaaaagatgtttaagaaagcatatggcatcattcattggattactaatgagacttctttttgcctttttgcatataagaaagttaaatttgatgaaactgtgtggctgacatgtcgaatgtaagaatgccacagttgacttgactcgaacctggatccgttttcgttcgtttattgcgagtcgggtcagctctgaccccaggtttaaaaccgaaaacgccattattcgacatgttctgaggaaatagtctgtgataaactattacgatgcgtattcattacgagctgaggcctttgttttgtaacctaatcgccccacctgctgtcttccagatgagatttaggtgcactccggaaacagttaaacaataatgtactctatgattaatatactactacaccacgcaatcttggagttatcatataatcagttcaagaatttatcaactccggcggcgaaaagaagtgcatgcatgctcgcattctccgtttgctcctgacgggtggctcagtagttaacaatctgaacggtatgaagaatatcctgacgaacggcgggaccagtatgtttcgggaaaacttcatcaacgttatggatgactatcatctgggtgttttcagtggacgcaaaaaggatgaacaactcgagtaacaaatcccaatcctctaaattgaataataatcgaacaccttcattcaagttggtatttctaatagattcttggaagaagtacatatacatattcattaaataataaataatgttgattattcaattttaatgt

SEQ ID NO: 910 - DNA, 2214 bp, Aedes aegypti
atgatctgcttggaagggaaactcggcggccagtatctcaatctggtggtaacgcagaccactaggattcgattgaaagaagaggaccccgggaatttgtccatatgtcgggagtgtctggtgaaggtggatttgatccgagccattcaggaccggtatctgatactagatgcccatcacgatacgctccgaggtcggatggcgccgttggagccggttgatgagacggcttttcaagggaaaattaaggtagaccttgatgagatagacgaagaaaaacacaatgaggttttagaagtaaacttcttggtggaaacttttagagatgatgaaggaaaagattcagtctcagaagcaagcagcaatgaggaacgggaagcaaatgaagaaaggaaatcgaagaaaccaccaagattgaaagcgagatcgaagattaaagcaatgatccgtgaaccaaagaaacgaggtcccaagagaaaagaacggccgcctgctaccttgaagatgattcgactgcgtacggaactgacccggaagtgttacatatgcccagcagattttcccgactcagaagatctgatggcccatttgaccgaggaacacgccggcaagatcgaatacacttgccagcaatgcgacgggaagcaactgaaaacggtcaaatcgtacaacgtccacctcagtctgcacgatccgagcatccgaccgctccagtgccgcttctgctcgctccggtacagcactcgcaagggtctggaagtgcacgaaatgcgcgaccacggggcgtcccacaagcacaagttgcaacggaaaaaggcacgggaacaccagtgcgagcattgtgggaaaatcttcaaatcgatctccatcgtgcgggaacacacgctggtagagcacgaccagggcattgctgctcagtgcaaaatctgccagaagacgttcaagcacaagaacaacctgacgcgccacatgctgacccataccggggagctgccgcacaagtgtgaccagtgtggcgtgcggttcaggattgtcaccgatctgacgaagcacgtccagggcgtccaccagggtattatgccgtacttttgcaacatctgcgatctgccgctgaaggataagaattcgtactaccggcatcggacagcggtgcacaaggcgatgaaagatactcctaccactcgccgatacaaatgcggtctgtgcggtacgtccttcgacatccaatcagaccttcagctgcacgttgatagaagtcacgaaggcgaagactacccattcaagcagtgtgcggtttgtccggaacggttccacacggccagccagctgcagtaccacaagtacacgaagcactgtgagcagcgatcgtccagggcaacgaaactgcagtgtacgatctgtggcgaacagcagcaaacgcgatgccatctggactcgcacatgacccggatgcacgggacggagaagaagtatgtttgcagcgagtgtggcagccgatttacggtgcaggcgaatctgtcgcggcaccggaaaacgcacaacgcggtcaagcagtttgcctgtgagttttgtgccaggacgttcaatcagaaggtggccctggacaatcacaggcggtgcgctcacacggatactcctaccactcgccgatacaaatgcggtctgtgcggtacgtccttcgacatccaatcagaccttcagctgcacgttgatagaagtcacgaaggcgaagactacccattcaagcagtgtgcggtttgtccggaacggttccacacggccagccagctgcagtaccacaagtacacgaagcactgtgagcagcgatcgtccagggcaacgaaactgcagtgtacgatctgtggcgaacagcagcaaacgcgatgccatctggactcgcacatgacccggatgcacgggacggagaagaagtatgtttgcagtgagtgtgggagccggttcacggtgcaggcgaatctgtcacggcaccggaaaacgcacaacgcggtcaagcagtttgcctgcgagttctgtgccaggacgttcaatcagaaggtggccctggacaatcacaggcggtgcgctcacacgggtgagacggcgtttgagtgcgagacttgtggcaaggggttcaaggaaacgtccacgtattacagacacagggtggcttgtcggaaggaacggcaagtggatgatggggaagctgtgaactga

SEQ ID NO: 911 - DNA, 2160 bp, Aedes aegypti
atggcacaatggaaagatcagctgaagttcgacatcgagtggggtcacgagcggctggtgagggcccagcaaaccgtggaagttcggccattcgatgtggaatcctggtcggtgatgatccgggagggccaaagccggcacatcaatgaggtgcgtacgctttacgagtcgctggtcagtgttttcccaaccacggcccgctactggaagatttacatcgagcaggaaatgaagtataggaactacgagagggtggaaaagttccagcggtgtttggtgaagattctgaacatcgatttgtggaagctttacttgacctatgtgaaagaaaccaaggccgggttgagtacgcacaaggagaaactggcccaggcgtacgattttgcgttggaaaagataggcatggatttacattcgtactcgatttggcaagattacatttcgttcttgaagagtgttgaggcaattggaagctatgcagagaatcagaaaattacggcagtgcggaaggtttatcagaaagcggtgataacgcccattatcggaatagagcacttgtggaaggaatacattgcgttcgagcagaatatcaatccaatcatttcggaaaagatgagcttggagaggtcacgggattacatgaatgccagacgtgttgcgaaagagctggagatagttacgaaggggttgaatcgtaatttgccggcagtgcccccaacggggacaaaagaagagataaaacaggtggaactgtggaaaaagtatatcaatttcgaaaaatctaatcccctgagaagcgaagacacagcattagttacgcgaagagtgatgttcgcaacggagcagtgcttgctggtgttaacccaccatccggccgtatggcaccaagctgcccaatatctggatcagagctcgaaacagctcatcgacaagggcgacttgaatgccgctaaagtatttgcggatgaagccgccaatattttggaaagggccattaatagtgtactgagtcgtaatgccctcctttatttcgcatatgccgatttcgaagaaggcagattaaagtacgaaaaagtccatcaaatgtataacaaattcctgtccatttcggacatcgatccaacgctagcttacattcagtacatgaagtttgctaggcgtgccgaaggaatcatttcagctagagccatattcaagaaagctcgtgaagatgtacgatccacttatcatgtcttcgttgctgcagcgctgatggagtattactgcaccaaggataaggacattgcattccgcattttcgagttgggactcaaaagattcggtggaagtcctgaatacgttatgtgctacattgattatctatcgcatttgaatgaggataacaacacgagagtgttattcgaacgtgtgctctcctccggcggactaacacctcagctttcggtggaagtttggaatcgatttttggaatttgagtccaacattggagacctgtccagtatcgtgaaagttgaacgccgaagaagtgctgttttggaaaagcttaaagagttcgaaggcaaagaaacagctcaactggtagaccgctacaagttcctcaatctctatccatgttcatcagcagagcttaaatccatcggttacaccgaaaccgatggaatactgaacccaatctccacaaaacattcaactccagttgaagctccagagcagccgcataaaattccacgtccggactttgcacaaatgattccatacaagccgaagccaaatgcctatccaggggaacatccattggacggtggggctttccctcaacctccagcactggcagccctctgctcaatgcttccaccgccaatttgcttccatggtccgtttgtatccgtagataaactgcaggacctattcagtcgtatcgttcttccggatgttgcgccaactccgatcgcaggagaaaatggcaatagcattaagctgtttgacctggcaaaggccgttcactggattgtggacgacagcacctattccggcgaaggcggattgaaaagacgacgaatggcacccggtggagacgatagtgacgaagaaactgccattcctgcgccacccgtcaatgatgtgtatcgcttgaggcagcagaagagattcaaccgataa

SEQ ID NO: 912 - DNA, 694 bp, Aedes aegypti
atgcaacacgcgatgcaacttaacctcaagccagggggtgagaaatgttgggattgtagtgccgtacccaccttcgaacaagccgcggaagatgtcaagaacctgaaggccaccccgtcggatgccgatctgctagaagtttacggcctttacaaacaggccaccgtcggcgactgcaacaccgacaaacccggcctgctggacttcaagggcaagtccaagtgggaggcatggaatgggcgcaagggcatgtcccaggacgatgccaagcaggcctacatcgccaaggtggccaaactggtggagcaacacgggctgaagtaaagatgattggcgcgcgaaggcatattagatgagacgcacagaatggggcactcctctctgcgaggtgggggagggtgccggaccttattcttccggaatctcacggaccgagggtaggcattattacggaaaaccttcgtactttttgtttttagagggtagattgtacgaacttcggattgtttcgattatgaatcacaaaaaaacaaacgctgaattagttctcgtcaagggttttgggttttttataaatacagttcatgtatttcgttgaatgctcttttgaattgataatactagttgctaaaagctatgataacacgtttaggaataagttgtttaacaataaattattaaggattccaaacat

SEQ ID NO: 913 - DNA, 1051 bp, Aedes aegypti
gcgcgcaagcaacaaaaccggcgcgtcgtagttgagaagtggcggcgaaacgtttattaatttttttttgtaaactcgagtgaacatcattgtgggtgtgtagtagtcagaataaatatcattatggacaatccggacaacacggtgaaaccagaacatcaggaaaaagaccaatctttacgggaaaatgtaccacacaatgctgcccaaactgctacgaagaagcgcccgcgaagtgaaaatgattgcccaactgagggagcagccaaacccaggaaaattttcaaatatggaaactacgaccggtactacggctatcgaaacatcaacgaaactccgaagcaagacgtccggctacaggctttcatcgcacaaaaagagatgattactgggaagcaactgttggatattggctgcaataatggctcgctgactcttttgatagcgcaacattgccatcctgcaagagccgttggcatcgatatagacggcgatttaattggaagcgcacgacggcatcaaacaaacatgttgaagctatgtacagaaaatcccgatacgttcaaagccttgaaacacgttgagttcagaactgcaaactacgtttatcaggacgaatctctgctggcgagcgaaaaagctcagttcgatgtgatattgtgcctttcggtgacaaagtggatccatctgaatttcggagattccgcggtaaagctcactttcaagcgcgtttatcgccaattaaatgaaggcggtgtgttcatactggaagcacagccctggagcagctataagaagaaaaagaagctcacgactgcgatattcgaacagttcaaacgaatcacgtttcgcccggatgagttcaaccggtatttgctgggcgatgcgattggctttcgagagatgttcgagctcaaggtagccgaccatacgatgaagggtttccgaagaccgatttacgcatttcggaaatagaaaggtaagtcatgcgtgatatgcaaacatttgttgagttaatgaaaatatgtgaattcgaaaagatatgcaatta

SEQ ID NO: 914 - DNA, 3375 bp, Aedes aegypti
acatttcgccatggatttccttactctccaacagcgctagcttacgacccggtacagaaattactagcaataggtgacaaatctggaacagtaagaatattaggaagatttggtgttgacgctcacgtaaaacacgaaggagaatccgcatgtgctgtgaatctaatcgaatttctggtgaacgaaggtagccttgtaacagctactgccgatgacactttacatttatggaattttcacacaaaaataccaaaagtagtacaaagtctgaaatttcaaagggaaaggatcacacatttgcacctaccagtaggcactaaatggttgtacgtaggaacagagaaagggaacacgcacatagttcatgctgactctttttccttaagcggatacatcattaattggaacaaagcaattgatccaatcagaaaaacacatcctggtgctgttgttcacttgtctgataatccattagatcctaataagttactgataggatttgaaacaggtcaattagttctgtgggatatgagaggaaaatgcgcagaactacgatggatatcacaggagcctcttttatcgtgttcctggcatcacgaaggaaaacatttcatcacatctcattctgatggatctttgtgtacgtggcctttaaaactttcacctaaacctctagtgcatggttttccacatgctaagacaaataaagatggaaaaatagaagcatgcaatgcaattcaaaaagtggaagttaaaacaaatagacttggtgaacaatttacaatattctctggtggcctaccgaccgaaaaatgtagtagtaagtctcattgcataacagtattagttcagggcaaatcaaccacagtattagaaatggaacatccggttattgactttatcacgatttgtgaaagtccatggagtagtgatttacaggaaccatatgccgttgcggtcctactgcaaaatgatttagtattgatagatttgttaacaactggttatccaacgtttgaatcgccttattctatggatatacacgagtcgccagttacttgttgtacatatttagcggattgtccatctgatttagttccagccttttattcagtaggaagaagtgcatcgaaccgtcgatcagggtattcggaaagagagtggcccatcaacggaggagaatggcaaccaacgtcctgtagttattcggaaatagtgctgactggccaccaggacgggtctatcaagttttgggactcaagtgctggaacgttacaagtgctttataaattaaaaacgtctaaaatattcgaaaaatctagagtgagatcgatggacgtcagcgacgacgatccgttatccatatcggcgatagcattatgtgccgagtcgaggaaactgtgtatagccacgaatagtgggcacgtagcgttatttaaatttaaaagagcggaaagcactggagatattgccgtgctcgaaattcctatttcttatgaaaacgcggtggataacgatggcagtcccgagtgtgaatttattccaaagacactgccaaagcaaaccgattctgtagaatgcgaaaagaagtacaacggaatgctgaaagtgaaaagtggaccacaacggaaaccacccggtttccaagctcaattagtatgcataaccccctggacccatggtacccatcccggtcaaattactgccctaaccattaattccagttatggattaatggcatacggaaatgaatatggcttggctgtggtagatattgtccagaaaatatgtttactcaatctctctactcaagagatatacggctcgttagatatgtacataaaaacgccacgaagtcccaagcggttagaaagcgtccaatcgaaagaagaccaattgagatcccctagcatagatcaggtaagctcttttgatctcttggacaattctttctctagatcgagatcgtcgtccatgtcaagtttagaaaatgctagtacagaggctgtgacttgtttggcatttgccgatagttatattaagaaaaacccatcattagcacttcctacgatgtggcttggtactagcttaggggctgtactaacagtgtcattgaatataccggaccaggaagccaggaaatcagaagctgtgcaagctgctttggcagtctataataggtctttcacattatccaaaattctgttaatttttattgattgtatgcacaatccaccgtgcagtaatcactggttaaggtacatttctcaatacaatatagttgatttaaagaaactattatttcttccattcataggtccagtatttcgactgaaaggatccgtgttgtccatgtcactgttggactgcaatggcgcactgataccctatgcgttcgaatcttggaaagatgacggcagggaaggcaaagaaaaacgtgatagtataccattttatagaagcactgctcttatactaacttcttgttgctattttgtagaaacccctaccaaacaaaccgccaataagatgagtcccacaaacccggacagtacgttatgtgaccgtcaatttatagtgatcgccagtgaaaaacaggcaggcgtgtttgcgcttccaagtcaaaattgcgtttacaagaaaaatatcgttgaaactgactttgtggtgaaagccgaaataataagtatgaaagacagtgtttgtttaatttgctacgcatccaatggacacttgattgtgtttactctgccaagtttaaagctattgcttgatatagatttccttccactatccgagttgagttttcaaaccaaatgtaaacagggaataatcgatcctatgctgtctatctggggacagcaattgattgtcaatgaagacaccaatctcatatcgaaaacattcagctttagtaacaagggtcatggactgtacttggtaacacccaccgaattacagaagtttacagtctgccaggagttttgcaatcagtacaatgaaatgcttggagagttgtatgtggcacatgaaatgccggaagcaccgaaggaaagtttcttcaaaggactttttggtggcggtatgcggaatctggatcgcgaagaactatttggagagtcgagtgggaaggcaaataaatccgtggctaagcacataccgggtccaaatgcaaacttgcaggacttggaccgtcgagcaacttcggcgtcatccgaagtcagcagagcacatcagctaatgttggagcgaggtgacaagctgagtcaactagaggaaagaactgaacgtatggctagtgaagcgcaacagttttccagttcggcgcacttattaatgaacaaatacaaagacaaaaagtggtaccaactgtaa

SEQ ID NO: 915 - DNA, 994 bp, Aedes aegypti
gtttctacgggatagagcttaggccggagaaagaagcactaaactatggcgctctttgtaaaagtgacgatttttgtcctggttacagtggcggcagttaacgctgccgtaacggatcaatcctgcttgacgaacatgaagaaatgcacggcgcggttttccggatacgcatacgtgacaacggacatcgccgatctcactacgcagctgttggaccaatcgtacgacttcctgttcctgtcgacggccttcaaccagcacaacaaggatcgccctggattcgagaagctgtatcgcaacatcgccgataaggcctgggcagacgcgatagcactgatgaagtatcaaagcaagcggggacatcgggcaaagctgaatgcaggctacaaatacgccaaccacgaactgcgatctttggccgatcccacgctggccgaagaacacaaatcgctcaagttggccatggagtacgagaagttggttgccgagacgacgcatgccatccacaggaagagttccgttgcccatcagagtccgccgcagtacgatccggacgtggcgcacttcttcgacgagaaaatcgtgcagggtcgcgccgattcggtccggaagctcaccggctacatccaccagctggaggacatccttaatgtcgataagaacacgagagacatgggactgcacctgttcgatcagtatctgaagacggtggagtgaagtcatgtggtcacgcgtgtgcaattatcttttacctactagaaactgataggggattgtgaggaagagcacgtccgacttatcgtcggcattagatctttacggtgcgtcaatgtgtgaacttatctcgagctactgccagcgatgccggattttcagggcatctgtagattttactttcacggtaaaaagattgccaataatagacgtaataaattctgcagtaaaaaaccgttcagtttagttatcaagttatatccattccaaatagaataaa

SEQ ID NO: 916 - DNA, 1248 bp, Aedes aegypti
atgtcttcgactagtgaaataatcgtatgcgacggggacgtagatggttggcggaatttgaacttctttcgagatgttgtttcaaaagatttgaatcttcaggaaaaggaattccacttgtacaatttgaacataactacaaccgaaaaacagtcaggcttcacttccctgctgtaccgcgttaaagtggatgtcgagctgaaggatggaaaacgtgatcaaaggttatacgtcgtcaaagagatatccaaagatgcctatggcggagacacgatggatacgtataatctttttcataaggagattaaagcgtaccaggagctgattccggaatttgaaaaacttttccaaaacaaagttagatttggaccaagatttttgaaagccgttacaactccttttactgtgatagtgttggaagatttgaacgcatctggatatcaaatgaagaattgtagcaaaaggcttgatatttcgcagagcaagacagtgttgtcccgattggccaagttccacgctgcatccgctgtgtacttcaaacaaaatggaccatatccaacgtcgttcaaaactggtatgtatgacgaggaatcagcaccaaactctgaaacttatattgggaatttgttcaaggctctggagtcgagcttgagagaacgcaactgttctagacagtacttggacttgataagtcaatggggtacaaatccttatgttgccggagctagattattccgtttgaatgaccaagatttcaacgtcttgaatcatggcgatctttggatgaataacgtgatgtttagcgatagtgatctgttgttgatcgacttccagattgctttctacggtagttttacatttgacgttcttgagttcatcttctgcacggtcgaagttgatgatataatccataagttcgacgatcttatcgagttctaccaccaagagctccgaacagcatttcaaatattagacaacagcagcatgttgccatcgttgaagacgttgcaagcagacatcaagaggcatgcatttctcgcaggacttctgatgatcgaagcgataccgatgattaccttcgtcaatgtgggagagatgagcatggatttgatgtcttctgcagaacctgaaggtgaagagtttaggaggaaactcttccataacgaaaaattcatcgaagtagtagaccaattgttgccatttctgcacgaacgtggttatttgaaatgctcaataaatgaatagatg

SEQ ID NO: 917 - DNA, 2415 bp, Aedes aegypti
attaaacctgaacgagcgtgtaatgtacttcaaaccgggtggcaggcaacactgaacagctgcaaagtgtcaaattcaatcagttcgcgtgtgtgtgtgtctcgaaaagccatcagcaagaaaatccgcgagttcccgtgtcgatagtcgcgtgaaaaacggtccgaaaacaagttttctagctttgcaatcctgcctcaaaatgtccgatgaatcagcccagtcagaacagagcgaactgaaatctccaacagtgcacgtgattcgtgaggtatacgagggggaaaacgcacacgaaaccttcgaacttgagctggacaaagcgctgtatgccaaggcggactacatcatcatcgaaccaacgcgactcggcgaagaaacgggccgctggatcgccgtcggaaattgtctacacaaaacggctttcgtcagcgggctggcatcggtggcggccggactgatatggcgcgatagattagttttttgtgcacccctttgtgcagtatcggtattttgtaccggattgtacacaatatcgtggtcttgcgatccctgtgttcaatatcaagttgaaaaaaatcctaaaagtctgtcaaaagtaccgaacgtgaacgatttttcttcgccaatagtgttagtctacaccagcaataaatgctccaaatacagccatcggatagtgacattgctagccgcttcatactgcgcttggcgcgtgtatcagctctttaagtgaatctacgtggtttgtattcactagattttggtttgggaaaggctttcaatctcgcgattgaaagcaacacgcggggtttcaaatcttatgtatcttattatgtttgaaattgttaggggatcggtttttaaattattctttctggagacttgcactaaaatgttctggtagaagaaaacaaaccatgcttttaatgcacttgcaaataattgcaatacagcatgagaaacgttttttagtgcaacgttaagtaaaaactgtagaaagcttaaaatgtcagctaaacaaactttagatgcttttgatttattcaattattctgtcgcaaataagaatgactaggttaaacatgagtagcattggcattactataagctgcttagaagaacggctgttttctatggtacattcatcttgggggttgtccataaaccacatggaccaagttttaagtttatctgtccgcggttttcgtgatatgtcatatgaaaataaaatggaacgtggtctttgttcagaatttcttccttaaaaacaccatgtgatttacgaacgacctataagagtgtaaccacgttcatcataaatgcagctgctcagagcttaagtgaaaagtacaccaaaggcaaagtaaatttttgatcaaaggcaaaagtttagttttgttcttatttgtttgttacatttttttgcttttcttttggtttgttgaaatctcaagtaacctatgtagaaaacgaagtacagaactgtgattaagcgccagtcagagtgcgataaaaaagacattgattcgaatcatagaacaattagtgtgggaaggattgtacccgatgcgaatagttgcgatgagtgtgaggaaggagcagttgcatttatttgagccttcctgattcctcgtgtgttcgtgcgttccatcgcgtcttcccttctcatacagactgcctgtacaattaagctgatatcatattgatatcgattgtgaatgggccaagcacattcgttactaaattatttcatcaacttctctgtataatgacaaaccttctggaaagcagattgacgacaatcaagttatcttgtttgtacgaaaatatcgttgtgtcgtttcgtttgtgttttagataatttatcagccactaatcgtttcgttcaaagtgaagcaccagagatcaggtaaaacgtgatattagaaacgcaaggacaagttttatcgttactgtttccacgcggggagtgaaacaaaggcgttataaagggtaattcaatgcatttaacttagaaatggagcaaaaacctggatgaggaaattggtcaaatacttagctgcacaattgttctgagaagggaaaaggttggttttagttttgctcaaagttttagcacttttggttgaaggttttggatttccttgcaatgtgattggcgtcagcaaatgaaacaccaatcatattagggttgttcgttttgaatcataaatcaaaagctgcaagaaaaagagaaatccacatgctgtagtattatgttttaaattatacgatctatgcaacaaagtatgttgataaaacaactgaataaaaccttgtaaaaagtaattattaaacagtcagaactatcatgttagaattaaaataaaagaaagtttagttttgctaaaaaacgtctattgcaatttattg

SEQ ID NO: 918 - DNA, 826 bp, Aedes aegypti
aaacaaacagaacgtcagaagttgcaatctgtgactacaatcatctgtgatctatgttttaatgctaagccaattgttccttagctaataagtgcctccagtgcacttatagatagtagaatacaattagctagttttcataatgacatcaccatcaaaggcgattctggaacgatgcatcttttgcaaaatcgtcaccggccaggatcctaacgcgtcgatagtgtacgaaaatgaacgcatctgcatcttcaaggacattcgtccggcggcagaacatcacctgttggccgtcccgaagtatcacctggatgacgtgcgctcgttgaccgaggctgaacgtcctctgttggatgaaatgcgacaagagttggggaacgtcttgaaggaccaattccaggtcgacttggccgaggtgcttttcggatttcacgttccaccgtttacgacggttaagcatctgcacatgcacggtatgggaccggtgggcagcatgggattcatttccaggatgatcttccggccgaactcgatgtggttcaaaacggatcaaactatcatggatcagatgccatcggtttcgcaggacaagacaccaacacaatgagggaatactctataaaatattattgattttttttagtcgttcacgtttctagagcatcgaatttgcagatgtttgttatggaagaatttgtatcgcaactccaatataaagttttttcctttcctgtatagcatatacaataaatttcaatttttcgttacactatcgatcattacttgaaacccaagctaataaggccacctctgtctctatttgctg

SEQ ID NO: 919 - DNA, 1186 bp, Aedes aegypti
gtttttcttccgggcgttgcagtgaaatctttcgtggaatatctgaatcgaaattttgccagtttctcaaaaatattgtagacagacaattatgacggaggagagtagcgtataaaggtttgaccataaattgtctataaattatttatcatagttatattgtcagcggccactgctcccttgaagtttcccgtgcgtgtctcgcttagtctatcggacaaaaaatgtgacatcgatttcatcaccggttctgtctcttcggtgcaactgtcgtgacatagttaattttacaaagtaagaatgcatagttcagacatgtgtgacatgtctagagcattttcatcagttgtcagtcctctcaactaacgggtagaattcaatagttaaaaggcattcgtggtccaaccagcgaatccccgatgtgaaccgtttgtcacctcgtttttgccgattttttcgtatttttttcgctcagtgtaaaaccattgtgacaatcatccatttgcagtttcgactttttgctcgggtagtcaactgtcaaacgcgagcaggggcggccatcgaaatcgatttgtgttcgagtggggaggctgttgtttgtttacaagtgggatcaaagaagcgagtcgttccggaaaataaaataaaaatcaacctttacgatgaattcagccacaaaggtgggtgaaatctttaccgccgcgggagcagcttttaatcgcttaggcgaactgacaatgcagcttcatccttcgtccgattctcccactggatcacaaatccgccaaactctgaagaaaaaggccttcgaggacgccggcattcagatgaagccgcagcaacagccagttccccagcagcttccgccaattatcccgcctcagacgcagaccattctggttcagcaacagcagccaagcattcaaccgacgacaagtgggaccgaccagcagccgacattgatcgtaaagcaggatgatcacgaatccggtggaaccagcagtaacgatgctgccggtgccggctacttgaataaaccttctgatgtgagctgattgttccaatcgcatggatggctttttgttttctacataaaactttgcactctattaattcattattttgcaacccaacgacaccaacctctttctcttatgttatagatgatgatgaccctgaaccgtct

SEQ ID NO: 920 - DNA, 2480 bp, Aedes aegypti
atgggacggaaacggaaatcggaggcttcgatgaagattcgtcccctgaagcaagccaaacaagaagaatcttacgatggatcgtctccgttgaaagttgagccgaaagcaatagatcctgatgcaagtaccccggaagaagtgtccaatcgctccgatacgagcagaaaaccgtggattgataagtgccaacagtgggtagcgaaacagagtgaacaagtggctgagccaccgccacttgaacccgtagaagacgatgaaccgcctttggaggatccggtggaactggcactggaagcttctacgccacttcgaaagaagctcaagtattacaacgagaagcaaattttgaactcggtcatgtatgaatgcgagtggctcaaatgtggattcgagacaaccgacgacattgcttacatcacccacgttgaggcgcacgcctaccaatatctggcgaaaccggaggacggagaagatctagtttgtttctgggatgtgtgcgattttcggaccaaggatcggcgcgacctggagagccatgtgcactttcacgtgtaccacaatcgactgaaaacgtacggcgctagcctcggtagattaattagcattccaagatgcaacggcgacagtcgccggaggaattgcatcgaaagtttcaaaaccaaattcacctgcgagtggtccgaatgcggggaacaatttatcaaagttcagcaatttttcgctcacgtgaactaccacgtgcaggatcagtttccgctgggtaaaaaatcgaccaaacaagaactacagtgtcaatgggccggttgcacacagacctataaacggtgcagtttggcactggaacatgtccggagacactcaacggaacgaagcatcggatgttacacgtgtggggcgatgtttggatcacgattgaagtacatcgatcactgcaagcgccaagtggattatcataatcgagaatttggctgtccggattgtggcaagctgtttgcctcgatgcaattgatgattgatcatcggaacattcacaacaaaaagttcgaatgtccgctctgtccgatgaagtggccctcgagaaaggcattgacctgtcatatacgataccggcatgtggaggataaaccgtaccagtgtaaaatatgtaaccatcgcaccgttactaaatcagatctggacgaacacgtgctaactcatgatgagaggcgaatgttccgctgcgaggagttcggctgtgacgccacttacaaatgtcagaggtcattgaaaaagcacgtcgatgctgtccactatggtgctggtccaggtatttacgcatgtcatctatgtcccagtcagtacaaagccggtgctactctttcaaggcatctgattcgggagcatgagttcaaacgaccgcctggttataacagattcacttatcgcgcaaatgaacacggaattctgcaattatccacgtcgactcctgacgacgtgaaggattccatacctgaggtcgattcgaaacagccgcaagtatcatctcaatccactaaatgcaaaattaaaagagacgaagacgataatgatgataaagaagaagctagtagatcccaaccagcaacattcaccagcttcgccatcgaaaaaatggaacccatcagtaaggataccatttcgatcgagctacaaccggcggaggaacttcccaagccggtctaccggagacgagcctgcaccgttacaaccacaggactggactcggagcatacgaacgattgggagacagcctcggagagcatgataccattgaccatgaagtgcgaagtagaggaagcgacaacgtcttcggtcgtgtcgaagaatatcgatgacttcacggttatgaagcgctacttgaagacggaaaagtcggaaaaacaggttgtaatttcctacgaagaaatggactccacgggtagcgtgatacgaagcgaaacggtgcaaactacagagttgaatttggagaatctactcaaaaaagacttgtagtgagatgggtttagtaattttactagggaaaggcagtgcaaaatcgaccatcaatagttttatacgttagtatgcaaacttgtatgtttttaaatgagaaactaatgacacctaaactaaacactgccaagatggaattagacacacatattttaatgaaacttgagttttcaaatatctcatcgaggagttgctgatgaaacaattgttggtttcattttaccagagttataagttatgtcctgtaatcaaatacgtaacagacgatataaagttttagattaaaataattttgaattagtgatagaacttcggaaaacaaattgcaaactctaatgttttcatcgcgtttcattgtaacttactttttagctagcttcactagtccatcctttaggtaacccattttaccacgcgtttccctaattattatttttttttaataaagtggttctcatttgttaatg

SEQ ID NO: 921 - DNA, 1808 bp, Aedes aegypti
cgacttttcaatttttgacagattcagtcgttatttttatttacattcggaaatcaagtttggatacattttttaatatttttatcgttgctcgccttgaaacatttttcaaataaatgccggagtgctgctaaaaaaaacacgattcgaagccatggataaatcggactacctgagccagaaaatgctcaaaccgctgatgccggaggacatgcgaagcgagctgatatccgccctcaagtcgcaaaacgtccaccacaatcgggtccgatccgttagaaatttcaaaaaattcccaccgccgccgcttccttcgagcccagcggccctgagcgtaagcaatgaggacgacaaacggggaaatcttcgtctgcaagccattcaagagatcagaacttcggaaatttcctacctcaagcagctggatctgttgattaactatttcgtagcaccgctgaaaaccaacggattgattcaggaacgtgagcatggtcaaatatttgggcagctggaaaccatctataatcttagccaagagttgctcaagaagttggacgacgatctggacaatgtagtccgagccttcatgaacctgggaccattcttcaagttgtactcggtgtacgcttttgactatcgaaactcgttgtgtacgttgcaaaccctgattcagaagaatcccgccatgaagcgattcattgccaatgccgaatcgcgaccagaagttcagacgaaggtgatatcgctattgatcacaccgattcaacgaattccacggtataagcttttgctgcagcaggttctgctctacacgagtccttgcgatggcgcctacaagcaactgcaggaatcgataaaacttgtcgagcagtctgtttcccacatcaactcggtggtggaggactacgaaaatacccaaagactgataacgatccagaatgcgctgaccaacaaatcgctgaagatcgtcaaaccagcgcggaagatcctcaaggaaggcgtcctgaggaagctgaaaacggacggcacgacgtccaaaaagtattgcatactgatgtccgatatgttcatatactgtcgaatgctgaaggatctggatcatctcttttcggacaacggattggagtgctgttgcatctttccgttgaagaagtgcaaggtgatggaactgttcagtggaaacttcaaaataacctgcagtggcgatgggactatattcaccgctgataatccggaagactgtcgcagctggttccagggcattcgggaggccatcgagctgcacgtgcagtgcaggaagacgctaagaaagctgtccagcaataggaagccaatgcgcaaaaagcacattcaaaagatggaaccggaggacgactatctgtggctgcttcggcgcaaaacggccagcccaatcaaatcaccaaaggcacgaagcaacctgtggccgttccggcacatggattgcttgagagctaatcgacgacgatcgcttcatgacgactcgctcttggcgacaacgaccgcaagcagtcggttcgaagccaacagaattggctatcagaatcggagagcactaggaggcattacccgtgaagatgcgaacgatgaaaatagcgtcacgatggggatgtcggctacaacttctccggactatgaaccgcaggcaggttctagtgggattcgtagcattgcgacgggccctaaaaagcaagttagttttcagttgcctgcttcgtactataagcgttgagagagatattgctttattactttttttgtaagttttttttaaagggtactaaaaaaaa

SEQ ID NO: 922 - DNA, 830 bp, Aedes aegypti
cagttgatatcaaaccctcgtagccagtgttcagtgttaacgcataccgtctatcgaaaaccccgtataaagtttctttgttcgtgtgttcagaaccaagtccgatcaagtcacgatgtcgatcgttccgattatgttccgtgactggtgggatgaccactgggataccccgctgcgtcaatcgcggattctggaccaacacttcggaagtggcatcagctctgatgatctgctaacggccattacgtcggcggctgctgcacaatccgctgtgcacaatcaattgaggcgtccgatctacaatcgtccatggcgccattctagccttgctccccgtcaagacatcggatcgacaattcacgccgacaaggacaaatttcagatcaacctggatgtgcaacagttcagcccaaccgaaatttcggtgaaggcctctgacaacagcatcatcatcgaagggaagcacgacgaaaagcaagacgaccatggcttcatctcgaggcactttgtccggcgctacatgcttccgccgggtcacgactccaatcagatcaagtctacgatttcgtcggatggaatcctaacgatttcggctccgaagaaggcgatcatggattcggccggacagaagacgattccaatcgtccagaccggtcaaccactgaagaagatcgctgccgagccagagaagaaggcatagtgacaagggtttcgaggttttactgttttatcaccttacatggttgggatttttgttcgtatagtacttgttaacgttttgctggaataaatggtatttgtttgtaattgagaatgtatgtggaaaagac

SEQ ID NO: 923 - DNA, 420 bp, Aedes aegypti
atggttcgttccggaatgatgcgcggaggccgtggcggaatgggaatgggaatgcgcggcatgcggggagcccctttcatgcacaagaagagcttcctgccgcgccatccctttgacttgaccctggcggaaccggctttcccaagggtgtccgctccgccggatgattccgtccttaccaacgctctgctcaagcgcagtcaggatctgacgcctacccagcaggagcaaactgccatttccaacctggttaccaaggtgcaagccgttctggacaacctggtcattgccccgggcgatttcaacaaatgccagctcgatgaagtgcggcaggttggttccttcaaaaagggaacgatgatggctggccacaatgtggccgatattgtaatcatcctgaagacacttccgacgaaagac

SEQ ID NO: 924 - DNA, 1610 bp, Aedes aegypti
ggtggctggaatccccacgtctatcccgaaatcattttggtgctagttctgccagtaaaacctctattaaaacaggccaccatcggagacataagtttaattgctcgcgcctacatattccccatttttttctcaagactccccagaaccatcacgacgaaatcctccatgaccacaataaatattttcgtatccttcgcatcgcatgaagctgctgtagaacctagaataattccggcggagcccgataaaaatgtttgcatccaatcagaaggggaactcaccgaatgaactactcgcacccttccataacttcaaagtgaaagaaacagcttcccagtcgccatcaaacctcagcagtccgtttctaaccgactagtatttcagtgcaaattacacatttaatctgataggttaccaaaagtgagcacagtaacggtcataaattagttcacattcgcagcatgtccaatcactcgaaactaccgccgtctaccaaaggattacttacagtgtttgagaaagcaaacgcaagtgtagtggggtctgcattgataaaagtttccggcgaaccctccaaggattgtgcatttggtggtgggggctcaattgacggctccagcattatggcgtccattcacgaatccgacgaggatttatcggatttctcttacaatgacagcgacggaatggaagacgattcacgccattcatcagttgacgagaaaaatgatcactcatccagtgctccatcaaaagaagaactatcgtcgtgcaagctgaactctttgaattcttctccaacggttttgccagtactgaatctagtcggtaccaagcttggcatcggaagcggaacagtggttcgaaaaatgttcaccaacacgagggaacgttggcgccaacagaatgtatccggtgcctttgcagaacttcgcaaattagtccccacgcatcccccggacaagaagttgtccaaaaacgaaattcttcgtatggccattcgatacattcgtttactaaccaacgtgctcgagtggcaaaagaagcaggaagcaaatgataaatctgatcaacaggataagccaaccaacatgtcaggcttcaacaaacaattgcgacagttcaacggaggaaataatgaaaaccacttcaccggaaactatcgaaacaacggaaacaacctactgatggtggttccgaaagctttcagcaagatacaacttagccagaagtgtgccacggagttttccaacggttttcaacgtcccatcaaagtggaaccttcccctggctgtggaggcacaatcgaaaagatcaaacttgtcagcaagttgtgtccgtcgggcaagataagcaagaatgggttgaaaaatagaaggaaagcagtcccgctttgtgccattgagggcggtatcaagacggatctgggattagccgggtacatggaaagaacagcagtggaaaatgagataaaacgtgaaattaatcacggccaccacggtcaacgtcagcagcagcgaggaacggaccgtgatggacccgagttcgaacaaaatcttgatacgaaaaaatgcaacggggatcgattggatgatgataaaaagtaa

SEQ ID NO: 925 - DNA, 2767 bp, Aedes aegypti
ctgtatagctctatagctactaccaccactcgattcgactactaaaaaccaacacacctccttcttgcgcttggctcgtctctgttggcgcattgttggttttgctagtgtattgagaggccagtcctcgccgccaaagtcgcagttgtcgcagcgcgcgcgattcagagctcgttgagcaggcaagtaattcacacgtcttctgcatattgccaacgcaaaaccgttggttctgttagctccagtaaaaactttcaagtggaacaagtgagtgcaacaaaaaaaagttgattggctgactgtattaccatatatcggagaactggtgatcaagaatttcagagtgcaatctatagaacgagttgaactgctgctgctgctggtggagcagttcttgtttgtcgcataacagacagattaacagtgcgcggaggttgttattgagtggcgccagttcagaagggcgttcagaaaattcctgtgagtagttacaacattcggtggacttcgatgacttgtgtattgagaggtgattttctggagaaagtgcaacaacccaaacaaacgtccatgatggatgcgttgatgcgaagaaacagtttcaacctttcgtttagcaagctgtggcatcccggcgcggagaagacccgctcaaaaagtggctcctttgggagctcggtggccatccagaagctgcgcgagtccaaatggttcgaccggggcgaggagcgcatcttctgtgcggtgatcgaagccggtttcatcgtcgaactgcgtcatccagaaaccggcgaaagctggttcggcgtaacggcgttcgagctgaagaaattaaccaaaccaacggccgaaaacatcaagatctactcggtgaaactgtccgacagccacaagcggttgaaggtctacaacagttccctggaccagctgtggcagcagggttaccaaatccgtatcaacaacctctgtgacaaagccaagaaggcacacaacgagaaggacatcatggctcagatcaagtacgccaccaaaaccaagatggccttccacaacagtcagcactttgccgaattctgccggtacggtgaccgaccgcaggacaaccggaaacgacaagtaagtgtactgttgaaacggctcgaagatgcactgaatggatcgcagacgtacttttgagaaccgcgcacaggctccgaactcgcggaaacacacacagacaaattgagaggtttttatccatttctttatttcgattcctaatcgtttcgttacgtatccgtgacccaggtggcggttttcgtcgtacggaaggagtttgctggttggggacatctttttcgcataagagaaaatcaatttctattttctaaggaaattgttttgatttggttgatcaccaatctaaggcaatgaagaacctatcaaatcagcaaacttctactgtagtccatttctaatctgtggaaaatgctttcgcttgcttaatttctatcagacgtagttcatgatcctgtggctaacattaggtgtagggtgtatacttaaaaattcaatcaaaatcacccccctacgtgggtggcatatccggttataaaacaatatgagcaaaatgtatagtgcagtctacctcgggcagacattacaggtgaatacggcttttattttcgcatcgacctctcggcgagcgtgcgataagatagaggaccattcttgtaaattgaaagcccacggattaaaacaacgacgccattaatggtgactgacatccttatcgggctcctctgtgcccctggttgtcaacctgtacccattcgatgatgacaagttacgctcaggaggggggagttgcatagaatggtgcatacgtgtgcgggtggagttcattgttataacatcatacatgcaagcgaactcatcgcagcctgttgcagttgacgtgaagcccgtaaatccatgttgacttaacacctttagataggcgtgagtaaaggttgcacgagggtgcataatgtagcaaatcaagatgacaagttgattagttgacacggttcgattgaacctcccacaactgaggggtactagactaagtgggtttacttgggccttttgagcttattctgagattatgatttggtttttcatcaatcatctagctacatctgacgcacttcataatcacataatcaatgtgccttcacaatttccaaattcataattccagatcgaatgtcaaacgttgaatcttcaaattttccaaacgatacactgctcggctttatcagcgacgaccttgccgagataattttactttcctacttaaattgcaatatttgattctaaaaactcgagatgtggtcgtggccccagccccccacaacataaaggaagatatgagttacgaaaaagtccatgcgagtccatggagagggaagggggaggtttgtatgtaaatgaaatttccacgtggataatgtataagacgagcgaaaaattccaatcaaatccaacctagttttggcaatagctcgaacacacattgagttagtcgtgtgttgaggtatccccgatctgtcattaaaaacagttttgaattctttgatttaaacttataaagttacaccataactacaaattatgtttcattttacttgtgtactagaactttacaaaatgttttctttctgttataagaatgattgtctacggtttcgtagaatggcgtttgacatactggatatttcaagtatcagagtattggctcaagcgg

SEQ ID NO: 926 - DNA, 1755 bp, Aedes aegypti
ggaaccattttcggtgcaggaaggtaatccgaaagtacgataagtaaaattgcacaaaatctaggatttacggactggaatagtgttaagtaaaacgcgtagcagagttattcaaacaaggtacatattcgtgtgctttgcgcgattcacttaacttatggctaaggtgctgatcatcgaacctttctatggcggctcgcacaaacagttgctcgatacatttctccagcagttccatccggccgagtatgatttgttcacgctaaccgccaagaagtggcactggcgttctcgaatcggggctctctatttctccgagaccattcccagggaccaccagtacaaaacgctcttcaccagctcggtactgaatttggccgaactgatcggacttcggccggatttggccatctgccggaagatagtgtatttccatgagaatcaacttaactacccggtgcgggagattaaggaacgagactgccagtacggcttgaaccagataatgacctgtctcagtgcggaccaaattgtgttcaattcgcagtacaataagatatcgtttttggacaacatcaaaagcttcctgaacattgcaccggatttgaagctgaagaacctgcgggaaaagctggagccacgctgcgaggttctgtactttccgataccgtttcattcgattccgaagaggattttcactaagaatgacaaaccgctgcatttgatatggccacaccgatgggaacacgataaaaatccccaattcctgaccaacacgctactggagttgaacaaacggcaggtggacttccgtgtatcgattcttggcgaacgagctcagtccataccggaatgcttcgaaaacatcggagaactgctcaaggagaagcttatcaactttggatttttgagcaaggacgagtactatcgcaccttactggatggagatgtcgtgatttcaactgctggccatgagttttatggggttgcaatgctggaagcagcttattgtggttgtctgccggtggcacctaacaaactagtctatccggaaatttatccggacaccagcttgtataacacttcgaatcagttgatcaaaatgttgtacaactggtgcaaaaacagacacctcttcgagcgcgatcgagccatcttctatgagaatttcgactttgacaagtactctgcggtgagcatagttcccaagttcatatcgatgatcagagcgcacctcggaacccctggcgttgtcaacggggtctagaccaggtgcgctccgtagctcaattctaataacgcgtttgttctagctctagaagttttgaattcttccaatatctatgtatattggtaataggccaaatatatgtcagcgcgatagtcgccaaacgtaaaatcgctcgtcaacgtgcaatctcgcgccaattacctatccactactagtaaaggtctacaaaggcacaaaaatgttcgttctaatcattagtgttacgaaattgatgtcggatggaattttgttttaaaaacgttttaagtttctgatcgttttctaatagtaattatacaaacattataactgagcttaaccattttaaatcgaggaaaactgtttggcatgattgttttcagcttttattgattgataattttcaatcttggataaaaaattgcattgtatattacaatgcagtagtcagaattctacaaataaaatgaaatatcgggaatcaacatattcatagataataaaat

SEQ ID NO: 927 - DNA, 986 bp, Aedes aegypti
agttcataactggacacttgttttgttagttgctttaaactgttgaacgtatttagctgcatttcggggctagcccttaacaatttgaaaagatgagcagaaacttattcagagcggtaattatgggagccccaggctctggcaaaggtacagtatctgcacgtattgtgaagacattcaacatgaagcatatctctagtggtgacatgcttcggaataatattgaaaagagtaccgagctaggcaagatagccgagaaatacatcaaagaagggaaactggtgccagacattcatattacaaagtgtatcctgggtgaactagcgcaactaaaatccagttcgtggctattggatggctttccgcgaacaccggaacaagccgaggatttatggcgccaggagaagatagattcagttatcaatttggatgtacctttcgatgtcatcgtggaccgattacgcagccgttgggtccatctacccagtggtagggtgtacaacattggattcaacgatccaaaggtaccgggtaaagatgatgtaaccggcgaacctcttagccaacgaccagatgatgatccagtggcggtgagaaaacggttggagatctacgacgcatgtactaggccattgaatgaatacttccatcagcagggagtattagtgacttttagtggtaaaaccacagatgaaatctggccgaatgtaaaaaaatatctcgaaagcaaaatcgtaaagtcatagacgtacggtataggtatatttttgtaatattagaatccaggtccaaggcacaaaagttatgttatcagtagagcaaacagaccaataataacgtattccaagactgataaggcattttggggtatgcaatatgcatagagttagaagtgataagaaccgtttggtgctacttagatgtcaatcaagcttacttaatagcgcatcatgagtaataaactggttttgaaacaatctgcttca

SEQ ID NO: 928 - DNA, 2140 bp, Aedes aegypti
gctcacttttggttaataagtttttccgtgaaaagggctgacttaaaatacatttttgttttcattctttgtttttttatcatcatattttaaagtttgtctttctccctcgcacctacgaaaaatttcgttcgaaactgtcaacgattgtgagaaacaagcaaaactttaatattcccctctctcttgctctcaaacaaaacccatggaaacatcaacagctttaaagccccaacttgtaaatattgtgagtgaatgtaacaaggattcggtaatcgtccagcgcgattttaaaacttttatttttccggttcgattgctcgttacattcagccaaaatgcaactgctgaaaaccccccggtggttatttggtgcacgagcatcgtttagttccaagtcgaaattcgtaccagctcacgaacccgccttggaaagtgatcttcatcggctggagaaatttctcgaggataaaccacacattctggtgctgaccggtgccgggatctctacggagtcaggtataccagattaccgatcggaaggtgttggcctgtacgcccggtccaatcataagccgattcagcatggagatttcatcaagtttgaatccgtacgcaaacgctattgggcgcgaaactacgtgggctggcctaggttttccgcaattgctcctaacgtgacgcattacacattggcgaagttagaacgggaacaacgcatatcgggtattgtgacccagaacgtcgataagcttcacacgaaggcaagctccaagagtgtcgttgagcttcatggcagtggttataacgtaatctgtgtaggcaaaacggggaaaggatgcgattatcatatccctaggcacgaattccaaaacatattagatcagatgaatcctcacatggaggacaagtcaacgatgatgcggccggatggagacgtagagctgcctcaggagtacgtagaaaacttcaaaatacctccctgcccggagtgcggaggtgccctgaaaccggaaattgtattcttcggtgacaatgttccgatgccacgaatcgagcgagttgtgcggatgataatcgagtcggatggcgttttggtgctcggttctagtcttaccgttttctccggctatcggatcgtgcttcaagcgaaagagctggggctacctgtggcaatagttaatataggagatacgcgtggcgatccgaaagctgatctgaaaatttctgccagatgcggagaacttatgcagaatttgttcaaaaagtgaaacgttagattgcagttgcagatactcaagctatgattttgaggtagattactagcaaaaaggtttgttttgtaattaaagagaaagcgaagcacgcaaaaaagcatattatactaaatgacatcagtataactgaaataggtgtaaatataatagggaaattacaaaatcttttaaacgaataaagagagaatgtttgagacgtaaaccattttcagtgttttatcttattacgttatatgtaggtacctacggatttgctaagagctacgaaactcgacattcacagtcagtttttctttgaatctagtgacaaatgattctccggagtatagactacctacgttatcatttcattaagcaatatgtttacacgggatttggcctatgtcagcagctttattgtttttcaactgtccaaagtttgatgccggatatatatcgtcttccgcgcttgttttcaggttaattaccgtgcagccttcgttgtctgctatatcaccgtttaggtgttcatagtagtactgccaccacttctcaatatcaatgattagcttaaatgtttctgcaaatatcagcctgtgacacatagcattttcgcgtatcaatcgttccttcaattcgaagccgccgtatacctaatgcttctgtggtacatccatcttcgagagaagctgcgccaattctattggatgtgcgcatcgtgtagtgtgtatacgcattatgagaaaagctcgcttgttaagcttagcaatatgagcgtaattatgctggcgatagctaaagacgtaaccgctaatgagttaacgctttaaacctcatggtgtttgtagagcaccatcatttttctacgaatccaacataaactg

SEQ ID NO: 929 - DNA, 1449 bp, Aedes aegypti
atggttcaaaactatctggaagagaactttgttaaatttaccgatggacacgaaagtaaaccggatattggcgaaattacaagcgacgtgaaactcttagatctggatctagatacccagttcaaagtggaatcatcggaatcagttgatccagcagatctaacatctcaagagcccaatgtggacgaaattgagtctgatacagactcggacatggatccgatctgggaagctccggcggatgatacatcagaggatgaaaaattaatcgacttgaaaaatagaattaaggaagacaagatcacatgccagatatgtgagaaaacattcacaaccgtggccaatagaaacaatcatatgtatttgcacagcgacaagagaacattcaagtgtgatcaatgcgacatgtcgttcaaatgtaaaatatatctgcgcaagcatagaaagagagttcatacagtgggcgaccacgtttgtgccgaatgtggaatgaagttcaccaaaacatccaagtatgagtaccatttgaaaactcatgagccggagaagaagtataaatgtcggttttgtgacaaatccttcattcaacattaccatagaaaaagtcacgaacaaacccatcacttggaaaaaccagaaaaaccagaaaaaccaacgtgtttgtgtaacatttgcggcaaaagtttcaaacacgaaagtagtctcaaaaaacacattcaaataagccacgatgaaagcaaaaaggaagtaaagaagtttcaatgcgatatctgcaagaaagaattcatacagaaaggtagtctaaaatcgcacattgcagctcataataatgttcgagcctatcagtgtgagcagtgcggtagaaaattcactcaagcagggacccttatcaaacatttggagcttcataatgctgagaagtcgcaccagtgtgaattttgccatgagtccttcctgcgaattcgatatctacgacgacaccgcctgttgattcacggaaaaaccgatgtgagcgtgaaaattgaacgatcgttggacgataccgaaagcagcgaacagatacaagtgaaacgaaaagagccgaaatcctcgaaaagacggagagatttgtcatacggttgtgagttatgcaatcgaacgttcaaactaccatccagtttggcagcccacgtaaaaacccacagcgaggagcgcaaattcgcttgcaatgattgcggcaattcattcaagaagcttgaacatttgaagaaccacatcaacggagtacatctgaagctggcgcataactgtgtggtgagtacctgggaatttgcatttcgctgccacttgctgatggggccaaactccccggtgaaactcagcataacttttgccggaaatgcgtcgacagctacgacaaagcaggtgaccgtgtctttcagtggaattggtgcacagggacaaacctga

SEQ ID NO: 930 - DNA, 2087 bp, Aedes aegypti
caaagttcggctcggttttcctttcgccaactccgacatgcagtttttgatcgtagtggcacaatttgtgagaagaggctattttaattcagatatttttattttattaggattaattccgtttatttgaatcctccaagcaaatcaaattgttcttcagaagacagttaaagctctatagaatcatataaatctatagattttacggaaacaaaattgtagttcacttcaaacaaagaaaataaaccgttttcatatgtcccgcttacagttttcggcctgcggcgagctcggttgacatctgcatgaagacgaccgtcttcataactgtttcattcgtaaaatcagccggtcggtagtaaaatagtccgcgttcggttattaataccagcgttatcagctccggcagtaggaatcattcgtctcacggaataattgcagctgttctcctttctcgggtgcaaaatggcctgctccaaaacgttccagggcacagcagtactgctgagaaactcggccgtcttcaatggctgcatcagtaaaagggccagctcatggtggggcgcggtgcagatgggtcccccggacgtgatcctcggtgtgaccgaagcctacaaaaaggacaccaacccgaagaagatcaatctgggcgtgggtgcctatcgggacgacaatggaaaaccattcgtgcttcccagcgtccgaaaagccgagcaacgcatgatggaaaaacagctggacaaggagtactcgcccattagcggaacggccgaattctgcaagcacagtattacacttgccctgggcgacgacagccaacacgtggccaacggacagaacgccaccgtgcaggccatcagtggaaccggtgccctgcgtgttggaggagccttcctgaatgggttcttcccgggtacgaaggacatttatctgccgactccatcctggggcaaccacggtccgatcttccggcattcggggctgaatgtgaaagcctacagatattacgacccaagcacctgtggattcgacttcaagggagctctggaggatctatcgaaaatcccagagcgatccatcgtccttctgcacgcctgcgctcacaacccaaccggtgttgatccccggccggagcagtgggctgaaatgtccgccgtcttcaagaaacgcaacctgttccccttcttcgacatggcctaccagggctttgccagcggagatgtcgccaaggatgcgcttgccgtccgtgccttcctgaaggatggtcaccagattgcgctggctcagagtttcgccaagaacatgggtctttacggtgaacgagccggagccttttcgttgatctgctccgacaaggaggaagccgctcgcaccatgtctcagatcaagatcctgattcgtccgatgtacagcaacccgccgattcatggcgcccgcttggtttcggaaatcttgggtgatgcaaacctgaaacaggaatggctcggcgatgtcaaactgatggccgatcgaatcatctcggtgcgcaccaaactgcaggacaatctgaaaaagttgggctcttcgcgcaactggcaacacatcaccgaacagatcggcatgttctgcttcaccggaatggatcagaagcagtgcgagcgactgaccaaggagtttagcgtgtacttgaccaaggacggccgcatctcgatggccggagtaacgaccaagaacgttgattacttggccgaggccatccatgccgtcaccaagtgagcggtagtgcgcgttgagtaagaatgattgcattttgcctttgtaccttttcctctttgttgaacaagttatatgggaaaagattcatttagatggaggcatttaaaaccaaatttcaaacaagtctgtggaagagcttttctattttttcgtttttggatcaatcaagccgtacgttatatttatatatttactacgattaaagtgcacgaacacgataaaattaagtcactcgaagaatatatatgatatttcccaagcaaataactattcggttgcagcatattaggcgatagaaataaacatcatatgttcgatcaatgaacgattcg

SEQ ID NO: 931 - DNA, 1384 bp, Aedes aegypti
tcggaggttggattaataacgttattaaaactttcagagtgttcaaagccacgtcggacccgttcacagtgattgtgatggaagatttagaactgaccggctatcaaatgaaagaatgcaacgctggattgagccagcaggattgcgaaaatgtgttggaaaagttagccaaattccatgctgcttccgtggtttactatgaacagaatggttcctaccctgacgacttcaaagagggaatgttttctgatggcctgacagctgaatttgaacagtattatgtccctttgttcgattcgtatctacaagcattggaggagctcagataccctgcccaaattatcgaatctctaaaaccaatgagaggaaaagtcttctcaaaaaccagcaaacttttcaaattggatccaacgaagttcaacgtacttaaccacggtgatgtttgggttaacaacattcaattcagcgatcgtgatcttcttttactcgactatcagatatccttctacggttcaccctcgttcgatttgctatacttcatagtcaattcagcttcgcttgccgtaaggacagagaagttcgatcatttgatcgatcactatcatcagcacctggtggaaggaatgcaaaggctaaatgccaaaacaccaatcccaacgcgacgagagcttcacgaagacatccaggctcacggatttctggtttgcgtgttatccatggaaacactggctttgatgttggcgatgcccgacttagagttgaagatggatttgctgggctctatgcagcaggatggagtagagtaccgaaaacagctttttaccaacgatcggtttataaaaactattgaaaagctcatgcctttcatgtgggagaaagggttcctggtagacgaggaagaacgaaaaacaccatttgaatcacatgaaaatgcatagatgttcttgaatggctacataataaatgattgcaatagtcaaacgtgaagatcattactgtcgttacactcatataaattaagcatcatagttgtttggcaaaaggcttttttttcaataaaatttaataagcttccagcaattgctagtccactatcgtaatcaacttgaatatctcaggtttttctggtccaattgtaaaacagttccaaaaaaaaaaaaaggccacaaaaatagaacaaattccatccgtttccatcgtagttcgatctaaattccattacaaataaatatctcaataatttaacattagctgacaacatgcctgatggtgaagcaaatcgaaaacatttttgcgacgtattttgatgtgcatttatgattttttgtatttcgtattctgatgaatattcatgttcaagttggatttcctgcatattgcctat

SEQ ID NO: 932 - DNA, 1437 bp, Aedes aegypti
atgttgaagtccgaattccagcaccagttttgggtcaccaaaaaggcggtgcaacggaagctcggttccaaagaggacgaaaatattgtggcttctgatggggaattggatgcaaagattgagctatttcaatcggtggccgacagttctcgacagctgtatcgcatcatcgaccaatatcaggaaagagtgtgcattctagctcaagaggaaaattccttggggaaatttctgcgcgaggtcagcaaggaatgtcccaccacgggcaagctaatgtccaacacgggtaaggcgatttcctactgcggccagcagcgtattacgatccgggtgcctttgctgcgtcttcatcacgatgtgcaaacgttcaaagggcgtgccatagtggacacacagaagacgctccaggtgatggaacgggaacgaaccgagtaccgggcggcactgagctggatgaagtcggtcagtatccagctggatccggataccggcaaggggctggagaagttccgcaaggcccagcggcatgtgaagacggccaagacgaagttcgacaagtacaccttggactgcttggagaagatcgacctgctggccgctgcaagatgcaatatgttttcccacgccttagtcggctatcagaactcgctgctgcagttcgccaagaaaagcaacgacacctacagggcagcactgaagagcctctcgaaggatccacactataacttctcgattctgaaggagctcacccaagctaatccgaacgccaaagaaggcgaagcggaaggagaggaccaagtggacaagcctgccgacgatgatcagatgctattctttcaggatgaattcaaagacgacgaagccgacgggaagcagaaagagaccaagccgtcgatttccaacccggaagatgacgatcaactcttgtccgatattccaacggccttgaacgaccttctgtcaggaatccctcagcttgagcttaacacagatgcagagcccaaggcacgaaccgaaccggccgctagttcggcggaccttctgggtctaacggtggatgatgaattttccgacttcctttcttcgccggccccattcttgccatcgacattgctcaccaatccggaatctatggagcagtctaccatggatcagctttccggtctagatctgccctcgacatcaggggctgcaaactccaaggtcgagaagacgtccaatgatatcttcggaagtttcctgtcgagtatttctaagactgctaatcccggtggagcagttagtcatccgtctgaaacgaggaaacctcaaaaggacgccaaaacaggcaaggacctctccggatggtatcagttgtttgccgagttggatccgctttccaatccggacgctattccgtccaaggctgatgcgcctaccaatagcttagccgcgtag

SEQ ID NO: 933 - DNA, 3606 bp, Aedes aegypti
atggggatgcgaaagcttcctatgtcgataaaatcattccaacaattgctgtacgtctgtccggactttacgcgtgccaatgaggtccacctgcgtcttgggcttatgctcaaagtgaatggagattacgaacaatcgctgaagcacctgcagcttgcctactccgactcgtcgccgtgcaccttcggcaaacttgaaattcgcttccacatcgcgcatctttatgaggtgcagaacaagtttaaagctgccagggaagcctacgaacagctgcttggagacaaacagctgacaccagcactgaaggccgacatctgccgtcagctaggatggatgtaccacagcattgaaccgctcggagagaaggcccaacgcgaacgttccgcaatccactgtttgcaaaagtcaattgaagccgatcccaagtccggtcagaccctgtacctattggggaggtgttttgccggaatcaataaagtgcacgacgctttcatcgcctatcgtaattcggtggagaagagcgaaggcaacgccgacacatggtgctccataggagtactttaccagcagcagaaccagcctatggatgcattgcaggcctacatatgtgccgtgcaattagataaatcccactcagctgcctggaccaatctcggcattttgtacgaaagttgtaaccaaccacgtgacgcttatgcgtgttacttgaacgccaccaaaaacccggacggacagcaatcgaccgtagtgtcagccttatccactgccagttgtgccaccaacgctgggacaacaccaacaaacacatccatagcttccaccggttccggaaccggaacagcaacagcaacaccagtaacgcccactacgccgtcgtccgcagcaccttcagcctcagcagtagcgatttcaggtggacgaagcggcggaaccagccttacggactcggcctcggctggcagcggcggtgccaaaccgcagagcctcgcccagaggattaaatttctccagcagcacttggcccacgcacctatgccgagtatcacttccaaacggcggcagctaccgtcgatcgaggaagcgtggaatctgccaatctcgaacgaaatgagctcccgacagcaacagcaagcggcccaggcccaacagcgacagttccagaaaggatacggacaggttagagctccggctccgttccaaggtcaaggacagccgcagcccacgtctcaaacgggctatggacagcctcagaatcctcaacagcagcaacagcaaacccaacagcagatactgtctggcaatgggaacttcgctgcgatcagtacccagatgttcaaaaccacgaccggaacgtacggtggcggcggaggattccagagtcagaccagtgcggcggccttcacgcagatcacctccaccaatcagtcggatttagatcaagaactccaagccttgctctcatccaaggacgacactgccaattttgccgaaacgctcctaaagcagttcggctccgacgatttggtggacatcaaggacatcaaaccactggaccagcagcagccgcagcataatggcaccgtactgcctgccgattcgacctcgtcccgaccggacggggagaaatcgcccacgatcaaagccgaagctacctcgtctaccggaaccggttctagcagtgcctgttccacgtcaacggcggcggcagccaagcgtcacctcttggccaagcacgacatcaagctggaaccggtcatcaagatcgaaaaactgtccgaaccatgcaacaaacccgctttctccatcgaaatgactgccaaggagctgctgcaggccgccaagaaatccgatctcaaagacgtggcggccatcagctcgaccctgtacatagatgccccaccgccttcgccgccggaatgtccgccgcagagattgacccgcgagcagctacaacctccgacgccatcggtgttcctcgagaacaagaaacacgcctacagtccgcagctgcaggagttctgcctgaagcacccgatcgccgtcgtacggcaactgggagcggccctcaagctggatctgggtctgttctcgaccaagacgctggtggaggccaatccggaccacagcatcgaagtgcgaacgcaggtgcaccagtcggcggacgagaactgggaccagtcgatgaagtccaaggtttgggcctgcatctcgcatcggtcgcacaccaccatcgccaagtacgcccagtaccaggcgtccagtttttccgacaagatcaaggaggaacgtgacaagttggccggcatcgtgagcaccaactccgactcggactccaaagattccctcaccaacagcaacggcgcaggatcgggcaacggcaagcggaagaagtgcaaaaacagcaacaaaatgctgcgcttcggaacgaacgttgacctgtccgacgaacgcaagtggaagacccagctccaggaactgcacaagctgcctccgttcgcccgggttgtgtccgcggccaatatgctctcgcatgtgggtcatatgatcctcggtatgaacacggtgcagctgtacatgaaggtaccgggaagcaggactcccggccaccaggagaacaacaacttctgctcgatcaacatcaacatcggaccgggcgattgcgagtggtttgccacgcctgattcctactggggcggtatccaagcgctgtgcgagaagaacaacatcaactacctgcacggttcgtggtggccggcgctggaggacctctacgcagagaacattcccgtctatcggtttacccagaagccgggcgacctggtgtgggtgaatgctggttgtgtccactgggtgcaggccatcggatggtgcaacaatatcgcatggaatgtgggtccgttgacggcgcggcagtacgagctggccatccagcggtacgagtggaacaagctcgaaagctacaagagtatcgtgccgatggtgcatctgagctggaacctggcccgcaacatcaaggtctccgatccgaagctgtacgagctgatcaaaacctgtctgatgcaaacgatgcgacactgtatgcaggtgttggagtttgtcaaatccaaaggcgtcgaagtgcggtttcatggtcggggcaagaacgaagcgtcccactattgcggacagtgcgaagtaagtacctacctatttacagtacatctatgcaatttttggtgggtttcgacatggtatgatcgttgaaatattgaagaacagacgttttattgttcataggatggtgaagaatcttgaatataaatgcaatcactgaaagacgaaacgtatttcatattcctgatggttctggttgatcaagaattaaaaaataaagttaatcgataatagatttttttcgagtaaggtacaaggtagtactcaactttgtaagtatatcactttagatcacatctgtttgcgatccgaatgcgattgaaatgtacactcctaagtaaggtattgtaatctgggggaaaattgaccactggggcgaaatttgatcaggccggcaccaatcacgcctatgaaatatacaaaatcatttgatttttccagcgaaatatacat

SEQ ID NO: 934 - DNA, 698 bp, Aedes aegypti
gaaatagattaaaaagtctaaatctggaggatctttcaaatcaaatcaatcaaatctttactgctgcgtttaatgtgtatcaaatttttaaattcatcgagcgttctaatttttagaataaaatcatttgggcataaggaataattgagtgttttcacatggggcgcaaaagcaaacctgaaaaatcaccggaccataaattagccgagaaaaagaatcgttccgcgaagcaaccaaccccaaaaagctcacttcggctggaaaaactacgccaataccaagccgatcgcatcatagcggaaactcccgagcaacgtcaggcccgtttggacaatctccgaaaatatcagcgtaaaagaatcaatcaagagttgcccatcgaacgggaggaacgattgcagaaactacgagaggctcaacagcgtcgtttggaaaacgaaacgccggaagaacgcgagaagcgcttggctaaactgcgcgcaaacgccctcaaacgcaggggtaaaacgtccaaacgtagaaagaaacgcaaatctaacgatggtgagcagaagccagacgaacccaaagccaagaattcgaaaaatggattgaagattaaaattaagattaacaaacctgcaaaacggacggaggagtaatcggcaaaatgaaatgagggagtagagataaatgtagtaaactgactgatataagta

SEQ ID NO: 935 - DNA, 1422 bp, Aedes aegypti
gttggagtagttctcagaagataaacgcaataggaaatcttatcaattagtaacaaattttattcatcttgaatgaaatgatccattgttttagatttgatttaagaaccaagtagtgcaacatgaatttaggtggctcaattcgaatcaataaatttggcgttctcataatcgcaatactgttggtctttctggtttactacatatcgaccggaaagtctcgaagctcaaactacgcattgaacaaaaatcccaatgaagtgaacctgcggaaacttttgatcgggtcgatacaggccgcccagcgtggaggcttcgaggtggtagaggtttccaaaagtcccgacttcaatgttcacagcaagggcaaaaccaaagaaggggccaacgatccggtgacggatgcagactttcgctcacattgtgtcatggccagcgggctgcaccgaatttttccaaagctgaaaatcatctccgaagaggacggggggaataaaccctgtccggattcgaagctgttcgatctggatcctacggtgatacacgaaaattccaacgtgccggatgaaattgtaggaattgaagatgtcacagtgtggatcgatccactggatgcaacacaggagtacactgagaacctgttccagtatgtgacaactatggtgtgcgtggcgataaagggcgttccgacgatcggagtaattcacaacccattcacgaagaaaaccgtttgggcctggacgaacaaggccgtctcggaaccactgagttatatcaagagggacgaagacgtcaagcatcctgtcgttattgtctcccggtcccacagtggtgatgtgaagaacctcgccaaggaggtgtttggagaaaatctgcatattatcccagcaggaggagcaggatacaaggtcttgcaggtactgcacaacaatgcaacggcgtacctccactcaacggccatcaaaaagtgggacatctgcgctgggaatgcaattctcgctgccattggaggcaaaatgacgacgcagaaaaatgaggatatttcctacagtgataaggattcgttcctcaacgaaaatggccttttggcgacggccgtcgagaacatacacgagatgtacatcaaaaagctgatcgaccatcagaaaatgagtcgttaacggtcgatcactcctcaaaatacatcacacgcgcgtactggttcgagagcaggattgcgcgttcaggttagaaagatttctgtgagactcattacatataacttacctagtatttgttctgattaatttgtgatcacgccttcgagttcctcgagtttaattttaattcagaattagatagtagtttgactgtatgtatggtaagattgtgattgatataattcctgaaatcgaataaaatttctcaacaattattacattt

SEQ ID NO: 936 - DNA, 1090 bp, Aedes aegypti
actgtcatcgggtgtatgtcaaagcaagcgctcgcaaaaaaagcgaaaaaaggtacaaatttgacgtttcgcccacatcatccgatcagttctcgagagaaaatcgtgcaatcaacagcggaaaacttactccagtctttggtagtcagtcaggaaaattgcatcacccaacagaccagtgaatcagtgaaatttcgcagcactatcaagaggaagtaaacaaccgattacaacaaaaaaggaaataaaaatgggtcgacgaggaaggtccgcttctccaccaccagcgcagcgcagatcggcgccaatggctgcagctccggctccccgccctgctccgccaccaacccaaccggccgtccagcatgctccaccaagtgcggtagctcctccgatggccgcccctagccagggcccaggattgatggcccagatggctgcgacggccggtggagtagccatcggttcggctgtgggtcataccgttggacatgccctcaccggaatgtttagcggttctgactcgaaagaagcggccccacaacagcaggcagccccagtgcagcagtacgctccggtcgccggatcggaaacgcaggccccatccggaccgtgcgcctgggaaatcaaacagttcctgtcctgcgcccagaaccagtccgatctgacgctgtgcgagggattcaacgaggccctgaggcagtgcaaggtgcagcaccatatctaagtcagtcgaaggtgtgtgaatatgcagaatgaccacctggtgcgagagatttgttacggctgggaagaggaacggtttggcccatgaagcgatatggtgaattgtgaacggaaaattttctgtagtcttgtcttagtgagttgttcagttgcacagttcaataaatccgtaacccagtatgcaatatggccaaattgagcttttctgtagatacgtaggatctttaaaacaattggaaaaaagtcgaactacatactacgtcactgtggtaaacttactgttaagctgaatgattttatttcttaatgatttaattctaggagttttattaaatgaatagcggatggagagaaggaattagaa

SEQ ID NO: 937 - DNA, 957 bp, Aedes aegypti
ctctcagttctcatcgttacatccaaagttctgtaccgggtaatgcagttggttcttgtttcgctattggccaccgcctttttcggcgcagttgcaccatcacctgccaggagaatcgtcggaggccaatttgcacagaatgagaaacagtttccctaccaggtggcccttttcgagaaggatgagttcaagtgcggaggatcgattatcgccgaaaagtggattctaacggctgcccattgcatcgtgcagcttgatggaagtcctacatcaactgatgttttaaaggttcatgtcggttcaccccacctaaaaaaaggagggaaaaaggtgaaaccttcaaggattattcctcacgctgactaccccaagatcaattacgacatcggattgattgagctagaagaggccctcgtttatgataaaatcatccaaaaaattgagctctatcgaggggaattaccagtaaatgtcacagttacaatctccggccatggaaaaaccggaagtaatgagccgatctccgagatgctcaagtacaacacattgaccgtgatggacgagacagaatgttttaaccaaataattcattccgggtggaagaaaatcatgtgtctgaagaagcctgcggataataacggtatttgcacgggagattccggaggacctgccgtgttcaatggaaagcaagttggagtggccaactttgtgctgggaaagtgtggatcgatccgtacggatggatatgcctttgtgcctttcttcgtaccctggattgaggaaactatgaaacagcagtgagagatagtgatttcaaaagcctggagtggaaattatcaataaaaatggagtggaaaatatcaaaaaatcaagcaatcctgaaacactaaattcactgaacatgtctagagtagggtggtttaaaaaacaaaaaaaagtttaaaaatcccactttcc

SEQ ID NO: 938 - DNA, 969 bp, Aedes aegypti
atggtcgcggttagatttttgaattcagtttatctctgtatattgacacttcagcttgctactgggcagcggatagccgaacagaaatgtcaagaatatcgcagtttaacagtatcccgtgtagggataatcccgttgatcgccagacccatgtcgatcgtccacgaagatttcaactgtactaccacggttgaggtaattgctggcggagaggaagctctggaaggtgagtttcctcatcatgccatgcttggctgggaatcgatcgattactccaccaccgtggactttgtatttctgtgcggagcggtactgatcagcgagtggtacgtggtgtctgccggtcactgtattgttgatggcgaatggggcacacccgttgtggtgcgtttgggagagtacgatttaaataatgattatgatcatcaagtggacttcgatgttgagcgagcgattaggcatccgagctacaaggtcagtagcgtttacaacgatatagcactggtgaaggtaaaacggagaattcgtttctcaccgtatatccgacctgcttgcctgtggacttctgaagcgtttaacttctcgtcggtgattgccactggctttgggcagctgggatttcttacagaacaagcaactaagttgaacaaagtcaaactggagctgtacgatggagccctatgtgatcggacatttaggagaaatcggaagttcaaacatggcctcattgattcgcagatctgtgccggaagtgaaaacgagaaggacacctgcaagggggactctggagggccgttgcaggtgatggtcgaggacaatggatgcacctattacgtagtgggacttacgtctcgtggccaagatgcgtgcggattgatgaactcagtggcaatctatacgcggatatcgtcttacgtgaagtggatcgagaacgttgtttgggatgaagatgtagatgtgtggaagtga

SEQ ID NO: 939 - DNA, 1458 bp, Aedes aegypti
atgagtgacgaatgggccatactgtccagagtaccggatattctggaagagtacaactacttgaacacatccagtgaagtgccagttgttcaatttgaatacccagaaaacctgaagaacctaattgacttcactatcgacaacggaggaccacgagaacagtcagaaatagaatcgataatcaaagatgttcttcattattcggtaaaaactggtcacagtaattttcacaatcaactgtttgcgggcgtagacccctatggattggccggaagctggatcacggatgcacttaacacaagccaatatacatttgaagtgggcccagttttcaccttgattgaagatgcgctgataaagaaatgtcttgcattgttcggcttccaagacggtgatggaatactttcgcctgggggatccatttcgaacatgtacgctatggttgctgcaaggtttagagcgttgccagatgtgaaacggaccggcttggcaaatcaacccacgctagtagcgttcacttcggaggaggcacactatagcattaaaaaagccgtccattggctaggcattggaatcgacaatttggttttggtaaaaacggattgccgaggtcgtatgattccggatgagttggagaagtcaattgaagctgttattgagtccggacgaaaaccctttttcctaaattcaactgctggcactaccgtactgggtgcgtttgatccgtttggacgaattgccgacatctgtcagaagtacaacctttggatgcacattgatggatgtttgggtggaacagcgattttgtcaagcaacaagacttaccttttggcaggatcggaacgcgcagattcttttgcttggaatccgcacaaaacgttgggcgctcctctgcagtgttctgtattcattctcaagcagaaaggattgttacacgagtgtaatgcagccaatgcagattatctgtttcaacaggacaaattttacgacatatcgtatgataccggtgataaaagtgtccagtgtggtagaaaggtggacgcattaaagatttggctcatgttcaaagctcgagggatgagcggtttgcaagcactcgttgacaatgcttttgattgtgctcgatatttaaccgaagaaatccggagcagatctgggttccgattggttttagacgaatatgagtataccaacatcagtttttggtacattcccaaaaagctacgggtggaagaagaacatcaggatgcatcttggtgggctcgcatttatgagatcacagctcaaattaaggaacatatggtaaagcaagggaccatgctattgggatacgtgcccatacctcggaagaatataggcaactttttcagaatggttgtgacttgccatccaaggccttcattcgatactatgagatttgttatagatgagatagaacgagtaggggaatcactttaa

SEQ ID NO: 940 - DNA, 1662 bp, Aedes aegypti
atgaaacaccttcgagtaatcgcagtcactgtgttggccatcctggctggcacttacgctggagattgcggcgaaaagttccgcggaaagtgcagttgtggactacaaacgtacaactatcaaacgaaatacgtggtcaattgcaccaatgaaggttttcgagatgctgcggtgctggaatacattcccacggagacagaggtggttattttcaccggaaactacatacaagagctgccctggaatgtgttcggcactatcaatgatcggctgaatctaactattgtcgacatgagtaataatcatatccacgaaattcgcggaaagacatatcaccacgtaccgaacgtgagacggctgatcctaaaccacaacaatctgagcatttccaggtacgacgacgaagttttcaactatcaccatccgagggtgttctccaacttcgtcaacctgatggaattgcacttaacgaatgcatttgccgacaatacatcagctgagctgtctgccgatctgcacgatatcttcgtcagcagtaatctaacaaaactggtcaaactacatcttgaacagaacgaaatctcccagttcaacgacaaaagagtattctgcgattttcctgccctgctagatctccatctcggagacaatttactaacggagctaaacttcaacatcacgtgtttgaaaaagctgcgctttctagatctcgaacggaacaagttcgaaacgttgcgacctcacgatatgaaaatgctcgatgaagttcagcgcgagccagggcgaacaactcccttcatggttgacttcacgtttaacccattccaatgcgattgtgccatctatccaacgtacgactggatgcgcagtaccaatgtaaccgttcgtaatctggacaatctcatgtgtttccgtaagaaacaccaggagccaattttttcgctgaacatgaagaagtgccaaaaatctcgatcgggaaaacgtgatcacaccgtcacattggtattcgtccttatttgtctaagttgcatcctggtggttctggtcggttcgttaatctacgtgagcaaggacaagctaaagacatggatcactccggtggtggatcacgtttcgaaaaaggtccaatacaccagcatcaaggacgaagaagccccagagcaatacgtatgatgtagcgcgttaatccagcgcggacccagtgccccgcgagtggaacctgtatagaaaccggcaaacagtgtgatcgcaagcggaaccacagacaggatctaatcatatcgaatgtagcttagcttaaaatcaatgcccgctgaagcaaatgctgtgtatataagtgaataatgaggacgagaaaacttaattttgaaaaaaaaaactaaacaaatgcaactaatgcttgaagcaacaaaacattttaaaaagacgtacggttagagatgaagaaataaccttataggttccctagataataatgaatgaatgttttaacaagtttttcttttcgttaagtttagaacataggatagtgtgactagaaaataaaatctaagaacgtactgatctgagcaatggctgtctcatgtgtagacaattattgatttaaattttaagaatacaaacatgtttacagttgaataaaatggatttcgatatgccatc

SEQ ID NO: 941 - DNA, 3375 bp, Aedes aegypti
atggcacgggcgctcccattactggcgctgttactcacgcacaatttggcaagttcatttccgcagcaccactacacggactacgtgctcggtggtgaactggtcagtggaggaggggctggcggaaccactacgggaattggatccagtggcacaggcgggaccggcaccggcgccggtgaacaacgattcacatgtcccgaaccgacgaccaccactagcgactgcacttgcatgtacgccagctccgattacgaaattcaatgtcccgtgattaatccggaaattacggtgaaaataaaacctggcatctacgcccagatacagtgctacgagaagcaggagtttagcgacctgccaacgctgaacgttggcaacacgacccaggtcaaaatcatccattgcccgctgccacagcgacagtccattaagcagttcatcaaattcctgggagttaaccacgtgaaggatttctggtatcagaattatgggaaggatttcggagtgcgattgatccggcagcatttcgagggtatgcatgatttggaaaaacttttcctcagctcaggaatcgaagacatccaaccggatctgtttgccgatctgccgaatctgaagtggctcattctacgaagcaatcacgtcaaactcctgcacaacgttttcgataacctgacgaatttgattatactggaactgggtgccaaccagatcaccgagcttgaaccgggtctgttcaagaatcaacgtaaactacgacatctcaacttgtggcgcaatcaactgcgaaacatctccaaagaatctttccgcggagcggagacactccaagagctagatctctccgtcaacgcgatcgaaacgctcaattccgatgtgttcacgttgcttccagatctcactgtcctgaatctcgggttcaatcgattcaccgttctacccgataatctcctttccgaaaaccgcaagctgcgggagttcaaattcatcaataaccaggctccgttgcaaaccctaccggaagcctttctaggcaacctccctcagctgaaatcggtcatattgaatcgatgcagcttcacacatctgcccgcatcgctgttccgcggatcgagcgaaatcacccacatggatctgagctacaaccagctgggatccgttccggagttgcttctccgcgatcagctgcgtcttcaagatctgaatttggcatataacgaactggaatcgcttccggaacacttgctggagaacacccgggagttgctcaccctgcgactgtcgtacaatcggctctacaatctttcggcaaacatcttcgcctcgctggacaagctcaccgaactgcacctgaacgacaacttcctgcacgccatcgatcggctcaccttcagcaacaccaaagccctcggaaagctgtacatgcaaaacaaccacctctccttccacgacttcagtttcgtcctccaggagcaggacatcgccgacaccgatggcacaccgttccagtacctggaaaaccttcaaatcctaaacctccgcaacaacagcatcaccaccatcttccgcgattggaactacaacaacctgcatctgcgcgagctcgatctcagctacaataacatctccaccctgtcctatctgagcctacagttcctttcgcaggatgtccgcgtcaatctaacgcacaaccgaatatccgagatcgatctcaaagacatggagcccatcatcacctcccagcgatcgcaggacgacagcaagatctacgtctacgtcaacgacaaccccctgaactgcaactgcgtcatcttctcgttcgtgcaatacctcctgaacgagctggatagcgccgtctaccgacggatccaattcgtagcggacgatcttcgctgctcagagccacagaacctggaaggcgtccacgtatccaaactgcaaaccaaagacctcctctgtcagctggatcaacctggcacggaaatcaagcattgcccagcgaactgcagctgccacgtgcggccactcgatcgcggagtgatcgtcaactgcacgcgtcaaggcctaacggaaatccccgcgttgccgcaacccaccatgttcggatacaacttcatcgagttacacgtagaggataacaacattaccgagttgccgacggagaacttgactgggtatggcaaggtcgccgagctgtacgcccggaataatgcgatcgttgaactgctcccggagaatctaccgagtagcctgaggatactggatgtgacgcagaacaaattcgttatgctaaatcagtcggtcgtcgagtcgctgaacagcagtaaggttctggagagcttgcacttgtcgggaaataaatggcgttgcgattgcagctcagcgcagttcatgaacttcgtccagcagaatcacaaaaagatagcagatctgggtcagataacgtgcgaaaccggtgaagagttcagcttgatcacggtgaacagcttgtgcaacgagagcgtgactacggtcataacaatcagcgtgatcttgtcgatactgggcctgctgattggattgttcacggtgctgtactttgtgtaccacatggagatcaaggtgtggctgttcacgcacaacatgtgcctgtggtgggtctcggaagaggaactggacaaggacaagctgtacgatgccttcatatcgtactcgcacaaggacgaagagttcatcacggagcacctggtgccaaccttggagaaggaaccgatgaacttcaagacgtgctggcatgtgcgcgactggatgcccggagagctgattccgacgcagatcgcaaaatccgtggaggactcccggcgaacgatcgtcgtcctgtcgaccaacttcctcgagtcggtttggggtcgcatggagttccgcacggcccacctcacctcgatggaggagaagcgcgctcgggtgatcgtcatcatctacggagacatcggcagcatcgaagatctggacccggagctgaaggcgtacctcaagatgaacacctacgtcaagtggggtgatcaatggttctgggacaaactgcgttacgcgatgcctcatcctccgaccgttaaaggactcaaaggcaagggtttgatcaagaatcacctgaagagctccgtcgacgataagctggagttgatcaagcccgttccggttacgccgccgccactgacgactcctccagccgaaatgaacggacacgccagatcacctccgttcaccatctccaacggaaaggtcgtcaacggcaacggttaccacatcaacggacacgtgatgaacggtcatgtcaacggacacatcaacggagcattcgttatcaacagcaacgccaaacagagcgacgtatga

SEQ ID NO: 942 - DNA, 2981 bp, Aedes aegypti
atgataacattcctaaacaatgatggagaaaatacgaaatgctcgcgctgggtgttatcactggcggaagcccgattggcagcacggcggcaagcacgtgcggaggcacgtgagattcggatgcgagagctggagcggcaacagaaggaactggaacagaatgctgaccgcgtgttcgacctgcagcagcagtcctccgggctgtcctcgctgggggacatctcgctgggaacacgatccacccgccttacggtcaacaacacggtacggggcagctcgctgtcatcccggaggagcagcgaggactcgctcgaggaggagggacgaagtctgcgggacctgcggcatgaactgagggaagtggaggaccggttccggaaggcgatggtcgccaacgcccagctggacaacgaacgtgcctcccagaactaccagatccagctgttgaaggacaaactggaggagatggaagaatcgcacgcccagctgcagcgagagttcaaggagaaatgccgggatcacgatgccttaaagcgggccaacgacaagttgtccgaagaactgaaactggtccagggccagctgaacgagcgggatacgctgatcgaggagcagggcctggtgatcgtgacggtcgagaacgaagacggtagtgatgcacgacgcgctctagtcacagcagagaatgcacaactcctaaagtccgcacagggttccttagatgtaagactcaaaaagttctcggaagagaaacaggaacttcaaaacgaagttcagacgttacagcagcaactgaacgacatcaaatcaaaaggcaggaaatacagttccttcaacggggcactggatgacgacgattatgaagatgcacaaagagaagccaacaagctgatcaccgactacaagtataagctcgcgaaagcggaacaggaaatcgctaacctgcaggccagtctagcacggtccgagtcccaggtgatacggtacaagagcacgtccgaagcggcagaaaaggccgaaagcgatctcaagatcgagaggagaaaactccaacgagagaaccgcgaattcatggaccgtttggaggagctagaaacttgcaataaccacctgctgaaacgactggacaagctgaagaatgcaaaaagtgcattgctaaaagacctttgatagagacataaaagttcatacccgcattcacaaaaaaaatcccctcatcgtcgttccctgttaaaaatgtgcacccgaaattacttcatcttccaaactgtatggttccattattcatgatcacagattgtaaattgtggaaatgatctcccgtttccgatcttgtatgtattttgtaaatgttttatttttcacatattttagtagtgagtgttgaaaggattcagttttaggtaccgcaaaatcgaaatcggcaaaagttttttcaagtacagtgcatatattaaattaaccagcttttcgcagttcgctccatgacaccggcagaaaggagatgataccctaactcctaacccaaaattagctccagcttggtgtgtacaggacagccaacaggtgtaacagttgttgtaaaatgcagtaaaatgtttatcgattgtacacacacatccaaatgatactagaatttgcacttaccagtaagtaggcttgtatagtaaatttattaaaaattaaacaaatatagacagaccgtttagtgtaataaattggaaaacctttaaatctgtgtacttgacagaatatagtgtaaattgatacagcagagattaggctcatatttaggcaaaagaaatgagataattgtgaaattctgcgagtagtagttaataattgagcatgaaaccaattttaatatttaatttattgaagaaaaattaacacctcctagctgacatggaaggtgcctcacttggcacgaagtcatttgtcataccgtatcatgcgaaactttcatctgccaagtgtcgccaaatgtcacgtcatatttcatcgaaaaagatctaaaaaaagttgccaatatgcaaaaatagctataggggcagaagagagagttgccgtttagtgaaggcaatacacattgtttgtaaaataagaaattgccaaatttaaaacacaagaaaatgcatcctgtcatcaagcgtgtcaaaagaatatcaagcatgagacgttgacggttgtcatcggtcagaaaactaaaactaacaaaggtaagttgttaaaccagttacatttacactgttgtttaaattatgaaccttatgaaatgtatactagtttctttcgttaacctctaaaacactgcatattgatgatgattattttggttcctggtagtaacctcattacttcaattacgccttcctaatttgttaactattttgtaaatctctcttttcgtattttaccaataaccacacaatcagtcaccatttttttaatcgaatagagaaacctttatcatactcctaaaactgccatatgtattttgtttgtttttttttacaattggattacggtagaaacctatcacctatacgttgcgccaacgattagagtatctgcaaaatctaatttgtacatttttgatcggaatcagatttccttcctaaaaaaaatattaaaatatgcaaaaatgaacgattgcgatgtcgttgttttcgcttagcttctatgcacatcttagatcaacaaaatgtaaaaaacacacagcaaatagtgtaaaagaagaaaccagaaacatgttgcactttatcgttggatcaaacaacttgaccctctgtaggaaaccaatctatccaaaaccctaaatgctctgacaggccgccgtatgatagaagtaccaccaacctatgttaggcagcgcaagacacacacaaaacaaaatagtgtaacaataaaacagcaacgtgtaacaaaacaagatttggaacgcaaaagaagaaaaatgtaaaataaactgattcaagcat

SEQ ID NO: 943 - DNA, 5196 bp, Aedes aegypti
atgtcacagctcagctcgcctttatgggcatttggcacaatcgacaaagtgtgtttcgactctcgaacgaacacattccaaggaacgaacaatatgcaaaacagctcgcctcaaaagacacaggactccagcaatgggatgatcggactgcaggcggagctcgggggaccaccaccgggacagctgatgaacacatcggccacaatgatggcgaacggccccccaaacggacccggtagtctcctggccccgggacatcatcattccaacgcgggaggagcaatggcacatccggcgcatcttcatcctccaccgccacctcagcagatgggtggccgttctggtgggacggctcgggaacgcgcccagcatgccgtggagtactacaacagcaacgtcctgcgggctcgagttggagcgggcctggccggaccacgcaactcagtccacgaacggtatccctacatccagcgtcatctagggatgagtgtcggcggaaagttggcgccacaaaactccgagaacctctaccgaagtaactccagccttgagcttattcacgatcacagtggccatcacgatggcctgcacccgggaggatcgaatcttcggcgagagtacggcagtcacggatcgatcgacgttatatcctccgatcggcaccacagccaaaccactggcgaaagtttcctggcaatgctccaagaataccggccagctgtatttggcatggaacacactcatcatcacacaggaaaccacactcatcacgatgctcgtaacggaggaatgctttcatccggggaagatagtctggaccgtggcaactccagtcccaagttacgcatgaagttcaatcgattgtggtcttcatcgggagctcacggagccaaacccggtcgtggacaaacgcagagcgcttcacttgatgacgcctctttgaatcccaacgtatcggtgctgtccaacgtttcgaacgttagcacaacctctacgaccacggtatcatctgcggacatcgaagaacgtcaacggagaagagcctttgcgcacttcgactgccaatcgctcaccgctaacctgggatacgccgccaagttgcgcgggcttttgcttgccagaagacgcaacactacaacaggagcttccgcagcagcaacgtacggaacacgatcatccaccccagacggcgacagcatagacgaagactacggcgatggccaaggcaacgaactgctcgagagttgtccgttcttccgaaatgaagtcggtggcgaagaagaacgcgaggtcagtctaacaaggatgcaaaatcccatgccggctggccagcaaagacgagctatccatcgacccgcgctagcctacggagtgtcccttctagaatgcggcgcaaacgagactctctggaaggccaacagctgcccctaccagaaaggccctcgaccgatcgaacaaatcgacaacggtgctctctactaccggcagcatttcttcagccaggaacatcaaaactggttcggaatggacgaacagctgggtccggtggcaatctccatcaagaaagaaaagctgcctcctagtgcgacgcctactcttgcaatccacggtgccgatgtcgcggccacgtccaaccaaactccccagcacctgtataggctcatagtccgcaccgccgagctgctaaccctgcgcggatccgtcatcgaggattccattccgaatcctcgcggaacgggtaagcacgtcagtaccaaagaaattctggaatacgttgcgccagaagtacaaatcagttgtctaagattaggcgtcaatacgccccagtgcgaacagcagctcctgaagctcgacgaacaaggtttgaccttcaagtacaaggtcggcatcctctactgccgagccgggcagtcctccgaggaggacatgtacaacaacgaagaggccggtccagcgttcaacgagttcctggatacagtcggcaaacgagtgcgcctcaaaggcttcgagcactataaggcaggtctggacaacaagaccgactccaccggaacacattccttgtacgccaactaccaggactgtgagatcatgttccacgtgtcgaccatgctccccttcacacccaacaatcggcagcagttgcttcggaagcgacacatcggaaacgatatcgtgacggtcgtcttccaagaaccgggagcccttccgtttactccaaagaacatccgtagccagtttcagcacgtatttatcatcgtccgggcggtgaatccttgcacggatcacacccagtatcgggtggcagtgtcgcgttcgaaggaagtgccggttttcggtcccccggtgcgaccgggtgctctctacgccaaaggaaagacctttgcagacttcctgctgtcgaaggtgatcaacgctgaaaatgcagcgcacaggtcggagaagttcgccacgatggcgaccaggacgcggcaagagtacttgaaggatctgacgagcaattactgcagcgctacgttggttgatactgggcagaagttctcgatattcccgagtaaaaagcgggaaaggagtaaaccgcgattctccggagacttgacccagcgtggagcgttctgttggcaggtggtattgcacgacagtggaatgtccactcaggtggattgcttcttggggatctcagcggagactttcgtgttgatcgaggaatgttcgaggcagatcatctttgtaaccccgtgcaaagcgattctgggatggtcaacgagtcagaattcgctgcgggtgtactatcatcaaggggagtgtgtaaccttgaatatgcgggattcaggtgatcgcgatgagcagcttgaggtgatcgaacgattacgagccgttacgaatggctgtggagcactggagctgagcttgaggcggaatcctatgggacagttgggtttccacgttcagccggatggagtggtgacacaagtagagatctctggacaggcctggacggctggactacggcaagggtaccgattggtagagatttgcaaagtggcagtagctacattatcgcacgatcagatggtagacttgctaaagacgtctgcgcaagtgacggtaaccgtgatagaatcgtttgcagacttcagtcctcggcggggctgtttcttgcaaaactgccgattcaatgcaatcaactatgaaagtgactacgagaccgtgccagaacgagcggacaagaatggcaagaagcatctacccagtgcccaactgcagtcggcaagccatcgtcgtcggtacgaacggaacttctctccaccacgatcaagcaatagctccggctacggaaccggaagcagtagtcgatcgtttactgcgctacatcagaatggtgttccacccagcgatcctcgggatcttcgatatggcccaacggatatgggcactctaacgagttcatccagtggccactcatcgaacgacgaacgctggtatgacgtgctggaacctcaacatgaagctccttcctcgacgatgcctcctccttcagaaccaaactatcatcacccaaagctcaccgcttccagtaactccctgcccttgtccggagccacacctcgaccgctttccctgcataacgactcccgccaattgaacaacaacccaaacggcaacgccaacgtggccctcctgaagcgtttgatcattagcgaaagcaacagtcctcatgacaatggaccctctgaacctctctacagcagttccatgaaaaaccttgccaatcatcaccatctcagcgctgccgaagaagaggacctctcgcgacacaactctccgcagctaaagcgctccgcaacgaccaccaacatctacgggatcaacggcggaagtggcggaggcagcaagaagccgttgaacaatggccctctcagttccagcagtacgtccagttcccgcaataacagccctcgaccgaacaacaacggtatcgccgatgccaagccgaggacgaagagctccgcccctcaacggaacagcgtcaactacacgggaagctccctccaggaagatctgatgaagctcatcaacccggactacatcgccgccgcttccagtgacgacaacttcaatgctggtgccatggaaaaaatgcataagggtaatccgaacagccacagcttggggaacatctcctccctaacggcttccgccgggttgaagcctatccagcagcaacagttgacgcagaaatctcgctcacgggaagggatcaacctgggttcgtcgaacaatctgaaggtcgccaaaaccaatggcagcgtgaacaatggcccctcgaatgggacatctgaacaggagtcggatgtcatattcaccacggcccgaccggcaacggtgatctcgtccacaaccagcaactgttccagcccggccagcgagttgaacaacaacaacaagctgcacatcaacgaggaccacctgaagatgtcgccgggcaagaagcagcagattatggcactggcggccgctgccggtggtattctgaagaatggaggcggcatgatggcgaacgggggtgggggtggaagttccggaggcaatgttaacggcagtggagggaaaattccgctgccagacatgaaggagatggactggagcagtctggtggatacggcgaccaaggcgatgacgcagctcaacgaatctggcgccaagcatccgcaaggaaacatatactacgacgacatcagccaagtcttaaacggcgtggttcagcagcagcaacaattgcaacaacagcagcagcaattgcagcagctccaacaacagcaacttcaacaacaactgcaacagcagcaaagctcccagttgactgtccaaaatggcgccggaacacctgccctgtcggatctatccacaactccgagttctgcgtcaccggtttctaccggaagcggtagcaccgccaacagtggccagctgatgtccatgtcaaacagttccagccttccggaactccagagtcaagtgacgcaactatcagacagggttctacgcgagcaacgtcgtagacggtccctggaacacgccgttcgtcgcttgaccgaagagaaccgtcggcttcaggacgaaagccaagctgctgtccagcaattgcgacgcttcaccgagtggttcttccagaccatcgatcgccagtcgtaa

SEQ ID NO: 944 - DNA, 4755 bp, Aedes aegypti; identical to SEQ ID NO: 469

SEQ ID NO: 945 - DNA, 1149 bp, Aedes aegypti; identical to SEQ ID NO: 451

SEQ ID NO: 946 - DNA, 1470 bp, Aedes aegypti; identical to SEQ ID NO: 458

SEQ ID NO: 947 - DNA, 1181 bp, Aedes aegypti; identical to SEQ ID NO: 56

SEQ ID NO: 948 - DNA, 2571 bp, Aedes aegypti
atgcagatttccaccgatgccgccggaatcccacagaaagccatcgacggatccacgtcggctttcttctcaccggaaacgtgctccctgaccaagccggaacgcgttccctggtggtacgtcaacctgctggaaccgtacatggtgcagctggtgcgactggactttggcaagtcgtgctgcggcaatggaaaaccagcgacgatcgtggttcgggtgggcaacaaccgtccggacttgggtacgaatccgatttgcaatcggtttaccggtagcctcgaggaaggacagcccctattcctgccgtgcaacccaccaatgcccggagcgttcgtatcggtccatctagaaacgagcggccccagtcagctatcgatttgcgaagcgttcgtctacacggatcaggccttaccgatcgagcggtgtccggcgttccgcgatatgcccccgggtgcatcggcttcctacaacggcaagtgctacatcttctacagccgtcagccagctacgttgcgcgatgctttggccttctgtaggtcccgcggtggaaccttgatcaacgagagcaacccggcactgcagggattcatcagctgggagctgtggcgtcggcatagaagcgatacctcgtcgcagtactggatgggagccgtgcgggacactcaggatcggaacagctggaagtggatcggcggcgatgacgtgtcggtttcgttctggaacctgcccggaggcgatgaggactgcgcccggtacgacggatccaagggatggctgtggagcgataccaactgcaacacacagctgaacttcatctgtcaacaccagcctaaggcatgcggacgcccggagcagccgccaaactcgactatggtagccccgaagggcttcgacgtaggcgctgtcgttgaatacaactgcgacgaaggacatctgctcgtgggaccatcgcagcgtacctgtctggaaactggattctacaacgaattccctcccgtttgtaaatacatcgaatgcggtctaccggctgccattccgcatggacactacgatctggtgaacggatccgtcggttacctcagctcggttcactacaagtgtaacgaaggctacgaaatggttggacgcgccctgctgacctgtgacatcgatgaacgctggaacggaccgccaccacgttgcgaagtgatcgaatgcgaaccgctgccgacgttgttcccgaacggagttgtagtggcgcccaacggcacagattacggatcccgagcggaggttgtttgcaaccgtggatacattccagagtccgatgagacgcacatcgtttgtacggctaccggccagtggagcaatctgctgccgaagtgcattgaagacccagcgagcaagacaacgacgccacccccaacgacaacgcgtccaccaattgtggttgtatcgacgacaacggttccagttactcagtacacgcagaagcgacctcagacgagaaggcccacaagaccaaccagccggttcacgacaactacgaccacaactcaatcgccgctgttcagcatcgagattgacgacgaagtccgtccgggtcacgaagagggaccctcgcgtaaaccgtaccgccccggccagaacacgataccaaagattccaaacgcacatgtgccaccgccgaaacggccgtcgtactacgaaccaccaaccacatccacgactactacaacaaccaccactaccactacacaaacaccaatacaaacacgccctactacgactagcacacggcagactaccacctcgcgttcgccgcaggacattatcctgtcgcagcatccgcaagacaacgaaatcgcaggctccgtcaacatccggcaggatcaatcgccgaaggtcaacgtaccattcgccgtcgataactcggacgccaagaatgcccgcctcaatctgggagccatcgtggcgctcggcgccttcggtggtttcgtattcctagcggccgtcattaccaccattgtgatcgtagtgcgaagaaaccgccaagcgaaccagcactaccggcaccgggcctcgccggactgcaacacggtggcctcgttctccagctccagttccgagtcgcgcaacggcctcaaccggtactaccggcaggcgtgggaaaatctgcacgagtccgcctccaagggccacaacagcaacagcaaccacagcagcggcctgaagcggaaggaaacgatggatgcgccgccgccgagccggtcgcgctcgcgggaaaacctcggcggcagccggtcgcgggatctggacagatcccgggagaacctgtcgtccaaccggagccgggactatccccgggacagcatggccgtacgggacggctccgagatggtcgtgtcggacgtgtgcgtcaagggcgagaagaaacggcaccaccaccatcaccacaagagcagccaccgcggcggcggcggcgccgggacggagacttccgggaaccgaacatcatgggcagcggcggcaacggtggaggcaacggacgccgaggcgaccaccgccactactgaccccgtagaatggtaa

SEQ ID NO: 949 - DNA, 3049 bp, Aedes aegypti
gcaagcagagcagtaaagtggaaagcaagtgtttacaactagtgcaaatgccgaaagtaccgatatatcatcagtgcgtaatctgttttggggaaaaggtataattgcgataatcaattttgtgcaaaaccatcctaggtgtgttgtgggggtaagaagaaaatagataaaacggattgtggaaaatttttgaaggtcgcatctgtgaccagttgtagctccaaatagcaagcagctaatcgccgcaaatccggcaaaacaatggcccggctaacggaagagatggtcattgccaggtcaaaacagtcagacctggcagcaatcaaaaagctgaactgttggggaagtgagctgagcgacgtttccatcataagacgtatgcgtggtgttgaggtgttggctttcagcgtaaaccgaataagcactttggcagattttgaaaattgcttaaatctacaggaactgtatctcaggaagaacaacattactgacatcgatgagctagtatacctgcagaatctaccgaaacttaaatatctctggctggaagaaaatcctgttgtggaaagtgccgggccagggtaccgacaaatagttctccgagcgttgccaaatctcaaaaagctagataatgtagatgttacacctgaagaagtttcagaagctatgcgaacaccagtagcccaacatcacccaaaacaagaggtatatgaagacccgccacctcctacgtatagtcaacaacagcaacctcaacagcaaccacagcagcaataccgaaatcagagcccagttgtcgaacgaagtcctccgaaccgggatagctactcccctgcaccacatacccagcactcatcacactactccagcaatcaccgcggttcctatcaccaatacgatagatcgcctggctcagaccaagacagtccagtttctggttacagagatcgtgttccgattgctcccagtatgtcaacccattcgatgaaggaatattaccagtcagactaccagcgacaaaatccacccactcattatcgacacagccagttggatctaacggaatgggatgaaagcagtcaaaatgcacatcaaatcaacaacaacaacggtcactcatcaaatcatatcaacaactaccaacagcagcaaagtcaacagcctcaacagtacgcccaatcaaactatccctcgaaccgacgaagcattggtgccaacagcgaaagggatttgtatcaatatcgcaatggcaacgctaaaggatctgagcagcgagatgaatgggaagatgtggagcgtcgaaggaatgaaaataggcggtcggattcaagattcaacgacaatgcaagtgtgatatccaatgctgtcctcaaccattttgctggagttcatcgaaggcctgttaatagaaactctaacttgttgtctgcaaccttgtgtttggttaaggaactggactatcccagtctagaggtagtggaacatgctgtacgatgtcgcatcgatgaactggccgaatagttttatatattaagatagttttaccttgctgaatggcgttctaatcgttctcgtctcgtatgccgtctcgaagatattatgcaaacgttattataatgaattcttaacacgtatctgttcagttatctacttctttgcactgtattacttaagatcctcttattgtttgactgcttcataagctaaaatgaatcgagagtgatccaaacgagatgtaaagctttctaaggcgaacatttgtaacatttttcagacaggaaaagaagaacttacatgatatgtgatttatattaattgagaaaagacttaaccacatgttagcatgaatgatgatgtacatgagaaaaaatagcagaatagtaacaaaacaaaataattgtattcaatagtaaacagcaatgaacaagaacacaataatctgccaactttgtaataaaattcaacaatagatttagctgttccaataataaaactaacttaatgtaatttttctattcggttgaacaaaatgcaagatttacggttaatgtatgatcaatttatgttaatgtatgatcaattttgattcagcgtttttgcgccctattttacattatcacgactgttaagacatattctcaaatgccttcttatttcacaacaagagcaggaaaattttctttgcgtttttgcaatattttgcaagtaaacagtccaatattcagtacaaatagaaaaacagaagtcgtaaaacaacttgaagggatgatttagtttcatgtcttcttctttaaaattggcatagagaggttttagcagtgaaataaggaaaatattttacatttattgtcgaggtcaaaggtgcctagtaatcataaccatgcaatatcgaaggtttgtgttcatgtttgctttgaaaagcctttgaaatgcttttaacgtaatctgttcctcgaaataaaccagtcatttgcagtttcgtccattattcaaatgaaaataatgttaatcctgaatcgggatcaccagaggaatacgggcgttttaaacgttaactaatgtaaagtaagtatgcatagtagatgcgaatacagtgtagcaaaaggatttaataaataactactaacaaacatgttttatcattaaatatcacattcatcacgaaatgcagtatgaaatatatttcaaacaaaattgcatacaagttattctcagccgatgtttcataacacttttagtcaagttttcaacaacacccttcaatccaccagccgttgtctgcgcgttgattcgaataatattttcagccaaagcttttcgattgactggcagtgttaagacggttgagtcgctagtgctttgcggtggctagaagcaactaatatttttcacgttgcgatatgcttggggtcggtaatgatttattactaatgaatgggttagatgcatggcatttttcgctactcataacataataacgcacatgtgctagcgtccatgcgcgaaaattgctaaaaggtaacgtgaaaattatttgtatggcgaaatg

SEQ ID NO: 950 - DNA, 9015 bp, Aedes aegypti
tatacagagatttccggggatgtggtatttggagagaagcacctgagagcatccgatagtccttattcactacggacggatctggaggtcgaacggaaggcaaggttgatcatcgagccgggggttacaatatatgtagcgcctatggtcggaatcaccgttcgaggttcactggtggcattgggcacatcggaaaacaaaatcacctttacgtcgttgcccaactctggctacaaggacatcgaatcggaccctcgagaggtcggtgcacggctggtggatggtcccaacccgctggcgggtagactacagctactgaatcaaggaaaatggcgatcggtttgcagcaactcgaagaactggaccatcgcagactacgaaacaacctgccgccagatgggttacaagggaggtcgcttctggaactggatggaccgtctacagaactacgaacctcggttattgtacgaggacccaaagtgcggaggcacggaagcatcgctgttcgattgctcctgggaaacccgacaggttggatccggtgtttgcgactaccacagtgatatcggagtccagtgtttgccattgtttgaccaggtaaccccccattggcggggaattcggttcgagtacgccgaaagtaaggagaagctagcgcacaatcacattctgtatgacttcatttcgttgtcggagttgaggaatgttgacatcatacgtgccggtacagggcggggaggaactgctggatcagctattgccgtgttgggaattccccctgttttggatcatgtcctagttgatcattcgtcattcacgggaatcaacgttacaaagcacgatgcagcattcatgtttaaggatgtaaccgtacgaagaagtcgcggatttggaatattcgtcaactcgagctatggatctacgctgctggacagcgtgacagtgagcgaaaatggtgctgatggcatccgatatgtgggccatgatctacgggctgacgaacgtaccgatcgtagcaaggtgttcgacttttgtaccttgacgactactgcttggcaaatttaccctctgcaactgtcgttcgaacagtctccgtttgccttatctcagaagcaatgcgcccagtccctcacaaccggctatggctatgttcttacgtttcactttgtgcacttcgagatggcacgcaacgaaagtgcagtcattcaagtttacgacggaatgtcagaaaacgatcgattgttagcatcgtggaacatacggaactcgactcgaccacaaactgtgactacaactcgagagaaaatgcatataaagctacgtgctgatcctagaagtcgagtcttggcacattttcgaatcactgccggtaccaccaaagcatacgatctgaacgtaacgcaagcgacgatcgttgataatggaggtcgtggcatagccatcgataatctacggtcgcaggttcatgtgcacgcatcaacgattgcgaacaataaacatgccgccggtttgcacgttactagcggtgctggtgatgtcaacgttactgactccaagataagcttcaacattggcgatggcattaacattacgtactacggtggaaatcggaacatttcacgcagttctttgagctccaataaaggctacggttttgcggtttggttgaatcagaccacaaaggatcgtcaggaatttttggagttcaaccaaacgacaactattgaatactctaatgtcatcaaaaatttggagattggtgttctgcatggaaactactgtggcgattcgtgggtaaacattacgggaaactggttcaacgacagcactcacaatgcaatcgacattcaatcatgttggttcgagacaatagagaatcgaaaactacgacttcagattggacacaataattttgaacattcgaacaagattgggattatcataagccctattctcaacttggaaggaaaaatcgagtacaatcaatttttgaaggggaggtacggagctttgttgacgaggaacaaaccctgggaagaattccgacatctaccagtccgactcatagttcagcacaactacttcatgtacaacagaggcatttacgttgcctctctggggttatctccaaacaccgacaataaaacacagtggttgttgtttacgcgaaactttgtgaagaacaacaagatcaaagaagcgttcggccctatggaagacgaaggagaaggtttgggtggagaaggccggttaaatcccagatcacgagtggctgcacctgtcgtcatctcctccaataacgttgatgtattccggaatatcatatcaaactatgaatcaaattacgaagtgggatcacagttgtcagatcagagcaaagccttgaacgttacatataactggttaggataccaggaagaggagaaaatctacgagcgactatttcatcgtaaagatcgatacgatctcgcaaaaattgaatacttcccttacttgttgcatcattctaatcctggcactcagaccatagctcagttcgcaaaatttgtaccattcttccacaaagaaggaaacgatcgcgttggcggagaagttgatggccaggagattcttccgtcaggaagttatactgtggaacgtgacatcaatgtccggccgggaggaaaactgattcttaacccgggagttattttgaacttcgcaccaagcgtaggaatgatggtcacaggaaaattggaagctcggggacgaaaacccgatgacatcatgtttacgttgaagcgggaagcagtaatgatggaaaacgacactacagaagctatcatgatggaccctgaggttatgatggacattgaaaccgaatccattgttgatttggggcctgtagatccgcagacccctaagattcccgttaggctggttggtggaataagtgaccatgaaggaagattgcaggtctacaccgaagggcagtggggaacggtgtgtgattacggttggaccataatcaatgctgccctggtttgccaccagttaggactagcacttaatccgaaagactggagactacagcgatcggaggttcccggagctggtacttcggaaaatgttcttctttcaaatgttcgctgtactgagcatgatattgacattacgcaatgccgagctgaaaaatcatcgcaaggagattttgagcattcctgcagtcatgagaatgatgttggtgtgagatgttatgaaggagcatgggcaggattacgttttggagtgttatctgagagagcagatcttcagtatgtaacgattgagaaagctggcctttttgattacatgactaacatgttcaaaccagcacttcaaatggacttgtcccgacataatttggatagcatccgagtcgtagaaaatttgcaggatgggttgggagtgatttactctgatatttatgccggatcggtgaatactatcaagaactcagaatttgcagcgaatcgtggaaatgggataagtatcaagcagctgggcttaaagattcatgggagcataatcaaagataacagaggatccggaatcaatcacgatgctgtaatatctgctcttgagcaacgagaaatcactagttggttcaatatggttccagatttcaacgttgatgattcagactatagaccaattatgcttccgaaggattctcaaaacatcgacatcgatcagtggcaggttaaacacataataaccctacccgttcacgatgagcccgttgaaaaaatgataactattcgttgccagccaggttatgtaataggcattcagctattgaaccctatcgaaaatagatctacggaaaatatttggatttatgattcgttagctggtagctcaaattctgatatttggcaagtaaaacgagatgtatcggtgttcccgcttactaccagtagctatggtgcaattctgcaatacaaaagtgggcacaatgctatcggaggtgcagttctagtcctgcggtccattcaagctccaatacaaaacatctacaatcgaatagttcgcggtccagtaccaactcttcaaatcacttcaacaaagattcaaagaaatttccgtggtatcactggtacttactacaatcgattcctgggagaacagagcgaactctatttgcgaaaagcgaatgaatcaatcaaattggtcaactgtgaaatcagtcataatcgagaggaagcaatgttcatcaactctcccttttgggacgtccacgaaagtaatatctcggaaataacgatccacgtgaacaacagtatgatccgagacaacggtagaggaatccgtcaattctccaaagacctgcgatcatccaataacctattccactacgttttgcaagatacaactgttgagagtaactcttttggaggactagagctcagcctgccctacgtttggcaatacaatgaaaatttcactcattcagtgttcttgggaaacgatacttgggttcggaatcgaaggtttggaatatcagacggacactatgcggtggtgaacatttcgtcaaacatattcatggataatgtttgtgcccatggattggttggattcaaaggaatggagaagaaaatgcgcattgataacaatcgaatcgttaaaaattccgggaaatatttgttggagttccgttcggatagtcagagtgaaattttaggcgagattccagcaattgtagcatttaatcatatcgagagtaacgagaaagtggtgtccacccggtccgaaatgaggaattttattcgaggtgatcgaggtaatgccaaagatcccacctgtgtgatcggattcggtggcgttcagaaggtgaaaatctatcgaaacgtgatttcgaacaacgagcaagattatgatttgatcgcgggaatcaaatctgcaaggctgaataatttcttggacgtacgagagaactggtgggggtcgcaagacgaagagcacatcaaaacacgaatcttcgactttgacgattggaacaatcatgctgaggcgcagtataagccatatctgattgaggatagcgtcgatggaagtgtttcggtggttcattccaaaaatagatctgttgacttggacaacttgggtggacgaatttttgaggatatatcaatattcaggagagatcaaccatatgtcgtcaaggcagatataactgttatgccaggagttacgatgaacatctatccaggtgtcgtaatggaatttgcacccaacgttggtattttggccttgggtacattgattgcccgtggtacacgcgatggagaaatcattatgaagcctattcaaagtgcttcggagaacttgaatcgtgttgaacgatcgttagagaatatggttaattacgactctatccgtctgtgcgcaaataggaactgttcaggaagtgaacaagagaacgacagaatccgagaaggcttcttggaatactataatcatactacgctccagtggatcccaatttgcgatcgtagatttactgaacgaaatgctcaggtagtttgtcgggagcttggttatgatccgcttgacgtcttcttcggtcacgatcgtcgaattgagttccatacaaattctcttactcgaatctggtcttgggttgagccaatggaatgccatggtgatgagctacgcttagaagaatgtcctgagagattaaacggtcagttgtacggacgtcgacacgaatgccagtgggattctgatttcgtgttcattagctgcaatggagaaccagaggagaggaactactggggaggagttcggtttgctaaccaggattttgaagccagtttgtacgagcatagaattcatgatgcaataactcattcgactgcgaagccggtagagagcgttatggaatttgttaaacttgatcgagcgggaatgttacacggagagaaatcgccagcgattcagaccatttccaaaaacccaagtataagcttcgtgtccgttaggaatagtgcgcaccatgctgtaaaccttgtatcaccaagtgatgctattcatttgaactacttatcggtctacaaggcattaggacaaggaataaatgcaatttcgttaaccggtgaaggacgcgaaagcgatgaatcgagttacaatcctttgaaagatttggatctaccatacaatctgttttcgatgattgacatatgtgatacgaacaaggagattacactggaagaacgagttctggtgtattacaaatatgacaataatccagttaattgtgtgaagatcttcaaaagtgcctatcgcgtaaaaccgcttggctttcgactgttgcagtcgaacctgttcaaccactccaaggaatacggtcgaagggatatgatacaactgatggatggtgatatctacaatgtatctgcgaggacgattggagttctcgaagctgattctgataatcagaagaagctattcagaactgttgaatctgcactgagcgttcgattgattgccagtggagcaccagcaaggcatgggttcatcgctgaagtggtaacgcttccaatttccgcaattggattcaatcgtgacgcacagcataacatttcgaattcggacattcaggagtgtgtcggtggaggattacattatgtgactgttggagaagtttctcctattctgacactggaaaggaacagattcatacgcaactgccgacagctttatggtaacttttcgtcgtgtgaggctaccattcgtgctgatgttcagaacatgcagtcattgcattttagaaataatcttgttcaagaaaatcagggaggtttatcgatacgagcagattcccgagggtccgctacgtcccttcgaggatggattcataacaatctatttgtaaaaaatcgaaaccgacctgcaatctatgtggaaggcagacagtcgtctccatatcaggaagttaccgttcataacaattacataactcaaaatgatgctgcattcaaggacgtggttgtgttgcgtcaggtggtttcaaacttcagctacaactatgtccacagtaacaagggtggtaggattattgaagtgtccggattcgatagagttcgccttccaatctatcagacgacttcacacaatggattttatgataatgttgcaacggattggagtggaagagcaactatagtggcagggacggcaggtcaacattatgtcgataatatttttgccaatccggagaatgactacgaaatgatcactgttaatcgttcaatcaccctggatgtttggaaaaccaaaatcgatgcaactctgaactactggagctacaacgaaacccttgccgttggatcccgtattcgcgatcgcttcgatgatcctcagctgctggaagtccaatacctaccactgcacatgaacaatcttacggtgctgaacggaaagtgcccacccggatggacgctactgatcgacacctgttacatgtacgtcggggcaccaatgagtttccgtgaagcgcgggacttctgccgatcggataacgcatcgctgccattcatccatggggactataatgcactgtggttcttcctggagcaacagtctcgttacctgcgatcggccgaaaaggtttgggttcaagatcccaactacatcgatcagtgcacttcgttcatctaccggaatgtggagattgaggaatgctatgagcggcatgcgttcctgtgtgaaatcgatcccaaggttgaaatcgatcctctcttctggaaagcggatgccgttgcaattggaatgatttctgcgttgataattgtgctaatgatgttgtgttgtctgtgtgtttgctgggtgtataaatctcggtatcgacaaacgcagagattgcagcgtaggaatagcattcggcaaagcttgcgcagtcttaacagcattgatccgcagggttcgattcgaagaaggaattttgtcgtctcacgctcaacggacacgctgaaatcggtcaccaccgggaccacagactacaaaaagatggcgtcaaatggttcgattgaatccgtagacaaaagcgtgctcagctcggagacaaattatgatatgtacgacaagcagcagtacagcaacgaatatacagagcaattgaagagccaaatgggttacactgatggcactacaagcgaggcagccgatttcatgcagcgccctaacgacagtccaccgcgtaccaaggtttacggtctaccggactatagttcccatggaggaagtaccgcttttgagcttgcatttagaaacgaaggattccgggacaactccactacttactcaggggttacccgaaacaattccatcaacacggccatcaacgaagacacacctatcattcatcaccagggcgataacgacgaaagtgggcccgatttctacggcaattcaagtactttaccgatgcggatcaaaggtgataatctatcattcctaaatgaactcaaaaatcgcctaccggagtacgaaccactgccttccaacggtcacagtagttttctgccagctcctccggagccaccctcggccaacgcatcccagctaagtgcaagtacactgccatacgatcagaagattgatcgccttaatttcagtgctcctcacgagtaccaacaaccgtcgattcaagttcgaaggccagaaccatcgacacccagcattgacgctcgggaaattcgacgccctgattcatacatgagggcggtcaaaaagtacgccactccaggacgggaacgggagtccataattcctccgccacgtgttgatagtaacggcagccgtagaccaaagactgtttatgaggcatcagctgaacaggaacctcaacgcgctccgcaacgtacaaactacgctcgctcccgttccgaagctctgctcgaaacaaacttcgacgaagcattgccaccaatgacggacatgctcagttcggatagccgcagctattctcaaccactagagactgctatgtaa

SEQ ID NO: 951 - DNA, 1053 bp, Aedes aegypti; identical to SEQ ID NO: 473

SEQ ID NO: 952 - DNA, 1211 bp, Aedes aegypti
agaccattcacagtagcgctagatgaaagattgtgattgcggctatcatgaggcatttgattattacagtagcttttgttctaatcagtgctttgctcattagcgccattcgagtaacttaccgatcatgtacagatgctcctgctcaatccggaatctactggatcagcatagcgaataatgccgcttcatttcaagtttactgtgaacaggagaaatttgctgggaattggttggtggtgcagagccgtaacgatgcttcaacaaacttcaatcgcagttggaatgaatacaaatttggatttggaaatctgaggaacaatttttggttgggtctggagaaactgcatcagctaaccagctcatccagttacgatctgatggtagtcatggagaactaccttgatttcatggcttttcaaaggtacgaaaacttcgcagtgaacgatgaatcggaggggtacagtttgagcttatcggataggaataccggaacagcaggtgattcattgcttatctataatggtgaaaagtttagtacttacgaccgggcgaacaacaaaggcaccgcgaattgtgctgcagagatgggagggggatattggcactacgattgtaggaagattttgagtacaaggagtaatttgaacggattgtacgatgtcgatcacatcatgaggaatggaagtggaatgtggtggggaatgtttggaggcaccggtaaacctctcaaaaggactagaatgatgatcaaactacgtgagtgaaacctgccaaaactacttacgagtgtcatggcaatgtgttatattttgttatacatctaagggattttgatgactacaatacaaagtttgaatttacagattaattagtcagtataccgtaacttaaacttgagctactgattctatagttggcagtcgtatttctctgttcctgaaactcgtctttctaatgtattgattctgagcaacataatgatcaatagcgcatgtaactgttcgccatgtataataagtcaaaacatttttgtgcgcaacgtaattgagcaggaagaatttctaacaattctccttcttcaatcaacgtatgcttgctaaacaatcatacttatcaccaagcattgcagaattcgttctcatttgatttagaagcacgatcaaaacaagcgaataaaaaaatatctcttctgtatcggttcataatcg

SEQ ID NO: 953 - DNA, 2070 bp, Aedes aegypti
atgacggaggccaacaacttacttgctcttctccaacgtcctctggagccaacatttcttccgaaagacgacggaaaaacggtcattgatgttccggatgatttcctaactgatcgttatcgtccgattggggctgagcttcagtctcgattctccagcgatgctgaacaacggattcccattcgaagcacggctccaccagatctctcctttgccgatggtatcgaccgtcgtggaccgttttctctttttatccctaaacatcgagaagcagctgctacgttgatcaccttgttcatgaatcagcctgatgtgcagacgttgatgagtgttgcaacctacagtcgagatcgtgtaaatcctgtgctgttccagtatgctctagctgttgccattcaacatcgcccggataccaaggacgtcaatatcccatcgatagtttcgctatttcctgatcagttcgtagatccagctgtttttcctaagttacgcgaagaaggttctgtcgttcagcgagctaataggatggtgatcgatatcccaccgaactacacagcttcagatcgcgaggaagaacaacggcttgcctacttccgagaagacattggtgttaatatgcaccactggcattggcatttggtgtatcctggagacggtcccgattcggttgtccgtaaggatcgtcggggagaactgttttactatatgcatagtcagttgattgctcgatacaatattgaacgtttctgcaatcgtcttgcacgagttaaaaatctctcaaatctgcgcgagccgattcccgaagcgtacttccccaagatgattcgcagctccaatgctcgatcctatccgggaagacacgccaacattacattgcaagacgttaatcgcgtagataacaatactaatgttcaggtgaatgatctggaacgttggcgcgaccgtatccttgaggctatcgatcaaggatttgtgttggacacgcaaggaaatagaattacattggatgaaactcgaggtattgatattctgggagatattgtggaagcttcaagcctatcgccaaaccagcgtctgtatggtagtcttcacaatatgggacataacgttattgcctacatccacgatccggattaccgctacctggaagattatggcgtgatgggtgatgtgaccactgcaatgcgtgatcccattttctaccgctggcatggattgatcgatcagatattccgacgcttcaaggactcgctcactccgtacacgtcatctgatctgacattcccgggagttaccgtcaactccgtcggagtgcagctgaatggtgccaacactccaccgaatgttctcttgacctactggcaacgatcacaggttaatttggcatcggggctggactttggaccggagggcaatgtgtttgcttcgtttactcatttgcaacacgccccatttgcattccgggtggagatcaacaacgataccggtgccgtgcgacgaggaaccttgagaatctggttggctccaaaagtggacgaacgaggaacaccgcttacgttccaagagcagcgaacgtactttgtggaaatggatacatctaccgtgacgttgaaccccggagtcaacactatcgtgcgtcgttcggatcaatccagcgtaacgatcccatacgaacgcaccttcagagccgtaggcaacaccactcagcccagtgatccgaatgcgttggctcagttccgattctgcggctgcggttggccccaacatatgctcatcccgaagggagccgctggcgatggcgttgagttcgatattttcgccatggtaacagactacaccatggatgctgtagatcaaacgtcggacacccttggaccgtgcgatgatgcacactcgttctgcggtttacgtgataagctgtaccccgaccgtcgagccatgggattccccttcgatcgcaaggttgaggcctcggtcgctacactacaggactttgttactcccaactccaacatgaggaccaactctcttagggtacggtacaccaacaaactgatcgcccgtgcttag

SEQ ID NO: 954 - DNA, 1308 bp, Aedes aegypti
atggtcgacaagaccaatcatctgggtttccggatactgtatctgcattcgaagggaaacaaaaacaatattgcattttcgccatgtgctctggccagtatattggtggcgttgtacgaaggcgccgatggaaaaagtgcatctgaaatacacgagaatctggtggtaccgtacgataaggatatcttgcgagtcggctatcgggacattcatcggcggttgaggagctatttctaccgtagggaaaatcttctcagtgggttgagtttgagcagtgaaaatataacgatacgacctgaatatgaatcgatcctcaaattctacggctacgatctggaaaacattccagaaatgaaaatgcagaccaccacccttgctccaacttcgccagattacatggagacgactactttcattaccgattatgatatgacctccagcgaagaggaacagtcaaccacggaatcgatcgcaactactttcgatttgagcatgggttctgcggaaccagacggagacggctccaccactaccgaatcggaacaacaatccgaagagactgaaactacaaccgtaactatagatgctaacgatgcggagaccactaccgcatcggaagacgaaaccactgaagaagaaacttcagaaactccagcagaagatgaacaaacggaggagcctactgaggaaccggctaccgaaggtggcgaaaaaagacgacgaaatcttcgtaaacgaggacaaaagcagagccaagtgcacagacgacaatctcaagccaactaccgaagaagaatgttgcgagctaggcgaagccctgaagagtttgacctggttagccatcaacggttcttgcaaaatttccttctacaggatgtaacaactgcctcaccatttgccgcattccccgctttctcagaacggtctaatcagttccagcaggatcggctattggacgacactatcgagcataacttctacctgagcgaaacggaaacggtcaaagtgccttataagatttacaacactatattgaagtacgcttacattgatcgacttcagtccacggtgcttgaactggaactagattccgatgactataagctgataatcatacttcccgattacgaattcggcatgagcaatcttatgaaactattgcaaaacggcgagaacgtaccaaatatgagagatatcgtaaaacagatggcaccttcgtgggtcaaaacgattgtaccaaagttcacgctaaaaggaaacatcattcttacaagcgacctgcaaaacgtaagtcggaatttcgtttga

SEQ ID NO: 955 - DNA, 1488 bp, Aedes aegypti
atgtgttgctgtaattgctccaacactgccaagaaggtttggtccttcatgggagtggtgctgatctttggcctggcagcgttcttcggctttgggttcccagcaatcgtcgattctgtggcgcgacaggaattcgtcatgaaacccggcacagaagtgtacgaaaactggatgaactctccagttcccatgttcatggacatctacttttgggattggacgaatcccaatgaaattaccaaccccgctgttcgacctaattttgtccaaaaaggaccatacgtcttcaaagaagttcatgaacgcatcaatgcctcattcaacaatgaccacaccatcactttcaagcaaaaacgaacctggcagtacgtcccggaacaatcgggtggagatttctacacagaccgagttacaacaccgcatacaattttgatgactgtaggaaagttagtcgcggaaatggacgaccctacgctaggggatcttgtgaatattattctcaacaataacgatcttgttgatggcatcacttacaaagacgttttggttagagacattcttttcgatggagcagaggatagactgttggcagctttacaaaatttgctagctcttctacctgaagtgccagaaggtgtggaattgccaccctgggatggattcggatactttattgaccgcaataccagtgcagagtacgacggcattttccgcatgaatactggcaccgattcgtggaccaacaccgggcagatgcgtacatggaacgatgaacctacggtcccgcactaccgaggcttgtgtggccaagttcgtggttcaacaggttcagtgaacgccccaatgaccagtgcccaaacaagagatccagatgactttgtgctattcattaccgacttgtgcaaagctataacgctaaagtatgatggtgattttgtgctaaacgacctcgaaggaaaggtttgggtgggagatgatcgagtgttcgacaatggccataacttcccagaaactgagtgccaatgtactgccccacaggatcagtgtccagtgttgaaaccaggattgctcgatgtatcgggatgcaaatttggtgcacctctcaaggtcagtttcccccacttctatctggcggatccgagttatttgaatgcagtgacagggctaagcccaatgccccaatcgcatcaattccgctacgctttgcatccattctccggtgttccaatgtccgtcaatggaaggttacagtacaacgtacatgtgaaggattatggattggatgctactcggggagttccagacgttatgttacctgctttctgggtggaacagagagttctccttactcaacaagtcattgatgatcttatgtacatcgatacgctacgatcagctgggcatatcacggcgtttgtgcttgtcggcgtaggagtaatcgcctttggcgtggcgctctacttctctatcttcgtgtggaaaaactag

SEQ ID NO: 956 - DNA, 1399 bp, Aedes aegypti
cttttcctactcgggttgtccatgtcttatcgcgtaacgcttgatcatcagtagctgtctaacataataaacactttcttatcaagtgtgttgggaatgataatatagcatctgttttctgtgagttggctgtatggtttgcaactaatttctcatagtattcatcagactgttccaattgtgatcagaaatgtcttttaaaatgataatctttattcccttggcagtgatatgtaatgcacaaatgttctatggtgtaatcgtggaagcagtccctgaagtcagcagcaatgattgtggtggcattggatgtaacttattgttccggaagctccaattactggagaacgagttcagagcagtgaacgcagacatgaaaaatctcatagaaagaacgtacaaacagattttggagcgtttagataaactcgaaacaacgatcacgcatcgcttggaaagatttgaaaatgaaaggatcaatcaagaggactttcgctgcaaaaaacaaccaaatcgaaataaagtgagtgatgtaacacaggaaattgaaaaatcaatcagtcaattgcagcaaacagtagaaatcaacttctctacaatgaaaagcgatcttaaactgatcaagaccctggttcccgacaaatcttgcaagcatctagtgtcatcaaaatccggaaaattttggctaagaccattcagcaacgaaaacacgatcgaagtgtattgcgaacaggaaaagttcggtggaggttggttggtgtttcagcgtcgctttgacggatcggtggatttcttccgcaactggacacattacaagaacggattcggaacagtggacggtgaattttggcttgggttggaactattgcaccgactaaccagtgatagaagattcgagctgattgtggagctggaagcgaacaattcgaccgtcaaatttgcgaggtatgatgattttgcgataggcagtgaggaggaaatgttcgctttgaaaaagcttggaagctttttcggaactgctcgtgatgctttggattttcacagaggcatgaagttttccacaatggacagagcgaatgggaactgttcttataattatgcaaaaggctgcatgagtgcttggtggtatggctgtggctatacaagtgatctgaaccaaccttacgttttgacgaaaagaaacattatacactgggctggattttcttttaaggaaggactaaaatcaactacaatgatgatacgagaaatttaggcctacatctatcacaacgcgaataaaactagaactagaagtcgagtctagtacacgacactgaagacggcattacagttgagttcgatacacgcgaatttatcaaaggatacacattatagtggaattaaatggtacagtact

SEQ ID NO: 957 - DNA, 465 bp, Aedes aegypti
atggctctttcattatatctaatcgctgttatctgttcgttggtcggcttcacagcctctcagcagacatgcgacaacgacaacagattctgcttcccaaatgttgtggcgaactggatcggagcggccgagtactgtagccgaaacggatggcgattggccgttctggactcggagcagaaacagcaacaggtggaggaattggcccaacgagtggacgcattcaaaacggctaaagtggaactgtggatcggagcaagcgatttggccagggaaggcaagttcatgtggcacccgacggggctggacgtgtcctactcgaagtggatcgccggaatgccggacaacaaagacggttacgaacactgcgtccatctgtggtacgaaccgtcgcggcttatcaactggcactggaatgacgtggtgtgcgcttcgatgcgtcgctttgtgtgcgaacaggcgtaa

SEQ ID NO: 958 - DNA, 2247 bp, Aedes aegypti
atgctgggaaagttaacagcgctcatatccacgttggtcgtggtccattcacaatttctggccttcgagcagcatggacaggagtgcgcactctacgtcagcggccccggcaaatcgtccgccttcgactacaacctgaatctgttccgaggcacgccatcaccgctgcacgcggagcaaacgtcttgcatcacatacgatgccatcaatcaagcctacttggatgctcgcaagcgcatccgcgtttcgcaacccaagggagactggaaaaccgaagatatcgccaccgtcggcgagctgctgttggacatctccatccaactcgccagaacatatggcctctcctacgaggagattgagaagggtctcccgtcgatcgacacctccaagactctgatccgcgaggtttgcccggctttcctggctggagtcgagtgccgtcccggcaagtaccgtcgcgtcgatggtctgtgtaacaacctgaaacaccccacgtggggagctgccatgactcctttccagcgtctgatcggcccactgtacgccgacggaatcaacgctcccaggatctccgtaactggacatgaactgccgttgtcccgtgtcgtatcgcgcaccatccatcctgatgagggctaccatgatcacgccggaaccgtattcgtcatcgcatggggacagttcatggatcacgatttcaccctgaccggaaccccactggaccccatcaaccgtaacgatccagaagaatgctgcaagcgtccacctcacctcaagcatccgtactgtaacgaaatccgcatcccagatgatgactacttctaccgcctgttcaacgtcaagtgtatcgacttcgttcgaggcttcccgtctcctcgcgccggatgccgcctgggatcgcgtcaacagttcaacactctcacctcagtcatcgacggaaacaccatctacggagtcaacgagaaattcacccgcaaattgcgtaccggctacaacggcctcctccgcatgaaccccgtcttcgccgagtacggcctcaaggacctcctcccactgaagttggacattccagatgagggctgcactcgtcccaacaagagcatgttctgctttgaagccggcgagatccgagtcaacgaacagctggtcctgacctgcatgcacacccttctggctcgtgaacacaatcgtatcgctacggagctgggacgcatcaacccgcactgggacgacgaaactctcttccaggaatctcgtcgcatcaacatcggtatcatccagcacatcacctacaacgagttcttgcccattctgctcggcaaagaagtgatggagaagttcggtctgctaccactgaaggaaggatactgggatggatacgatgagaacatcaacccggccatcatcgacgctttctccgccgctgccttccgatttggccactcgctgctgccgacggccatcgaacgttggtccaaggctcacaagttcatcgcctccaagcgattgtccgatctgattcgtcgcccgtacgatctgtaccgtgccggagtctacgacgagtacctgatgggtctgatgaaccaggttgcccaggctatggacgactcgatcacccaggaggtcaccaaccatctgttcaagaaggagggcgcccgtttcggtatggatctggtatcgttcaacatgcagcgcggtcgcgaattcggcgtccccggatacatggagttcagaaagttctgcggactgcccacggccgataccttccaagaactgttcggatcgatgccgaatgagaccgttcggcggtacgagagcatcttcgaacacccttcggacgtggatctgtggtcgggcggtgtgtccgaacgatctctgccaggatcgatgttgggaccgaccttcgcctgtatcattgcgacccagttcagctacgtccgccgtggcgatcggttctggtacgagctgccgaaccaaccgtcgtccttcacgcccgaacagctgcaggagatccgcaaggccaagctggcgcggctcatctgcgacaacaccgatctgatcgatacggtgcaaatctacccgatggtgttgcccgatcatgaaatcaatccaagagtgccatgcaagagtggaatccttccatcgatcgacttgaccaagtgggccgattacggtcacgaatctcactcacctcatcaatatcaattcctaaacgaattacctgagaacgtcggcttcaagaaataa

SEQ ID NO: 959 - DNA, 1254 bp, Aedes aegypti
atgaacctctggatcattggattttgttcaatatattttgcatgttctgtaagatctcaattcacgtcggttcctgtaagttatgacgctcagaacgatcataacgagttctcatggaatgcattcaagaaggtattcaccgattacaaggaaaacttcgtcatgtcgccgtattcgcttcgtcggctgttttcgtgcttccaaggtgtgaaacttcttacctctgcatctggtacaaacctccagcaggagctgagcaatgtgttgaaaattgcaccaaaccagcagccatcgggccaagatcatagaccttacgttgaacagtgggtacggtactccagtgccaagtacctcaacaggacggcaatggcagtggccatcggaagcgaaaaagtctcaactgtatatgaaagcattattaacaactgtgtgatctacaccggacatcttcagccatccaatgcccaacgtatgggacaagtgatcaatgatgcactgaagaacatcaccaataacgcggtgcagagctacttgaccgatacggacatcaatccgaactggaagttcttcgcgatcgactcgtggcagttcgaaggattgtggaagtataaatttcaggaagagttttcagcaacctgctatttctatgcaagtaaggagaagaaaggactcaccaagttcctgtacttggaggaaatgttgaagtatggaaacttccctgaatggaacgtccaagctgtcgaccttccgtatcatgatcaaagtccgctgtcttgccttcttgtgatgcctttagatggaaattatgaatctctgatcaactccatgaaccagtcccgttttaaagatgtgctgtccaagttgaaagaaaccaaaactacagttcgtatacctcagttcggattgcagactacggttcccggaagacaactactcgaatctatgggaatgaaggtaccgttcaaccagggtgtgttcaaagtgtttgaacagggccaggatgttgcactgggagaaatagttcagaagatggaaatgagtatagcagccgatggagaaaaacaggctcaatcgtttgtggacaaacgacaggacaagcaatttacggctcatcaaccgtttctgtttgtggtatacgatcggaatgagctggtaccgattttggtcggattctacctgaagacgccaccggaagcggcaatgggactggaagataagcagaagtgcgatgatccaccggttggttatcagtag

SEQ ID NO: 960 - DNA, 4032 bp, Aedes aegypti
atgcgtccctcaccggctttgttgtcggtcctgtttggcaccattttcggtgtctttggtgcatcgctgagtaaatcactcctttcgcaagctcccgacgaatgccggtggtccggttacagtgaagacgatctaacgctcgtgtgtagactaagaactattaacagtgagctggagaataccaattttagtgtactgcatcctgaaaacaccgtccgacttcggttacagtgtaacgatggactgtttttccaatccagcatcagccctggcagcttccgacagctgtccgaactgcgatcgctctcaattgagtattgcaaaatagcgaatctcagcgatggatcctttcgaggtcttaaggagcttatgaacttgacacttcggacgcacaacaccgattggtcatcggttagtctggagatcgcgccgcatgtcttcaactctgagctgtcgaagctcgaacagcttgatctaagtcagaacaacatgtggtccatacctgatggcatgatttgtccactgacaaagctgcaatatctgaacctgacacagaataggctgcgagatttgtcagtgttccattttagtgcttctttgagcacgcggctctccaagaaatgtggaggctcaataacgattctcgatctatcacacaataacatcgacaatctgccaccagccatcttttccggtcttgggaaactgactgaactgcgcctgcagaacaacggcctcaacttcattgccgatcgcgctttggaaggcctcctctcgctctccaaactcgacatttctctaaaccggctatccaaccttcctccagagctcttctccgaagccaaacacatcaaggaaatctatctgcaaaacaacagcatcaacgttctggcccctggaatcttcagtgaactccaacagctcctcgttcttgatatctccaacaacgaacttacctccgagtggatcaatccagctaccttcaagggtctttcccggctgatactcctcgacttggccaacaacaaaatttccaaacttgaaccatccatcttccgggacctgttcagtcttcaaatcctacgactccaggacaacttcatcgaaaccatccacgaaggcaccttttctgaactaaccgcactacataccttggtcatttcaaacaatcgcctttcgaacattgagtacttctccttccaaggcttgagccgtctgaccctcctatcgctggactacaatcggatatcacggattgatcgggtagctttccggaacttatccacgctacacgatctgcacctgaatggtaacaagctgttgcaagtcccggatgcactgtacgatgtcccactgctgagaaccctagatctgggtgagaaccacatcagcaatatagacaacgcgagcttcaaggagatgtttcacatgtacggtttgaggttgaccgagaacaacgttgaaacgattcggaagggtacgttcgatgcgatgaagtcactgcagattctgaacttgtccaaaaatcgactgaagaaggttgatgcggcgtgcttcgataacaacaccaatctgcaggcgatccgtttggatgggaactatctgacggatatttcggggttgttcacgaaacttccgaatctggtttggttgaacatttccgataaccatctggaggtgtttgattatgcgttgataccgacagggctgcagtggttggatattcatgcgaacaagatcgccgagctggggaattactttgagatcgagagccagctggcgttgagtacgatcgatgcaagttcgaaccagctgacggagattacgggcagtgccattccgaatagtgtggagttgctgtatttgaatgataacttgatatcgaaggtgcagtcgtacacgttcttcaagaagccgaatttgacacgggtggatctgtttgggaataagataactacgttggatccgaatgcgttgcggatttcggcggtgccagacgacagggcgttgccagagttttacatcggaggaaatccgtatcagtgcgattgcaatttgaactggctgcagaagaacaatgtggactcgagaacgcagccaaagctgatggatttggatagcatctactgtaagctgttgtacaatcgagggaggacgtatgtgccgctggtggaggcattgccgaatcagtttttgtgcaagtacgagacgcactgctttgcactgtgccattgctgtgatttctatgcgtgcgattgcaagatggagtgcccggcgaggtgcacgtgttatcacgatcagagttggacgtcgaatgtggtggattgttcacgagcagggtatgaggagcaactgcccgagcagatcccaatggactcgacgcaaatctatttggatggaaacaatttccggacgttgagtagccatgcatttttgggacgaaagaagttgaaggtgctgtttttgaacaacagcaatgtggagatgattagcaatcggacgttctacgggctgaaggaattggagattttgcagttggatcacaatcagattacgggattgaatggatttgagtttgtcgggttggatcggctgaaggagttgctgttacagttcaataagatatcaacgatcgcgaatcatagctttgatcatttgcccaacttgagggttttgaggctggatcataataggatcgtggagtttaacatgtggcacttgccgaaacagttgacggatttgcggctggcatccaatccatggtcctgcgattgcgagtatgtggagaagttccgcgagtatttgaaaacgtacgactttgtgagggataaggtgaaggtacgttgttcagcaacgatcacatcgggaaatgacacggccatgattgttggaggagcggtaaatgggtctgcaacgggggcttctgctgttattccgaagggagtcccggatggcagtggggagtcgaatggggttggagttggtggattcttgatttatttggacaacagtacgacactgtgcagcggagcggtgccactcgataacatcatcaacggaaacttgacgtcgcgcaagactgtgctatcgcctccaccgatcgaaggttatatcccgctgctggtggctgcgctctgtggtttcacggtgatcatcatcatgacgctgattatgttcgtatttcggcaggagatgcgtgtttggtttcattctcggttcggagtgcggctgttttaccggaatgccgatatggacaagaacgagagagataagctgttcgatgcttttgtgtcgtacagctcgaaagatgaagcatttgttgcggaagaattggcacccatgttggagaatggtgacccttcgtacaaactgtgcttgcattatcgggattttcccgtgggtgcgtacatagccgatacgatcgtccaggcagtggagtcatcccggaggacgatcatggtcttatcggagaatttcatcaaatccgagtggtgtaggttcgagttcaaatctgcgcaccaccaagtgctgcgagatcgacgaaggaggctgattgtgatcttgctcggagaggttcctcaaaaggacctggatccggacattcggttatacctgaaaaccaacacctaccttcagtggggtgacaagctgttttgggaaaaacttcgattcgcgctaccggacgtgccaaacaaccaaaggcgtcggcagcagcaatcgatcaatatgactcattccaactttcgaaacaactaccagctcactcgaacgccaaataataggaataacaccagtaaccaattgatcatgctccaacagcagccaccacaaccagaccccagactgcggcaacagcagcagcaagagcattcttctcttcagcagcaaccacttccgctgcctggacttgcgcagcaaccgcaaccaccacaactgttgcaacatcaacgccagcaacagcagcagcaacaggagcagcagcagcggggtgccggcaatgcctcgccccgaacagtggggatccacatatga

SEQ ID NO: 961 - DNA, 453 bp, Aedes aegypti
atgcagttcaaaatcgttcctcgtgcagttattgttcagttcctgttggcggctgcgttggtggactccggaagacttccgctgaacaagtacatcatgatggatttccaggtatcgttcttcgaagcgtggcgaagctgtcagttctacggactccaactggcttctgtaacatccacggaagataatcgggagttgagcgagctgtttaacatgtcgaaccgcggcaatgacacattttggctcgccggaacggacataggtcgcgaaggtaaatggatctggattacgacgaacaagctggtcgttcagtacagtcactggggcagcattagtccggagtttcatgagtcgcagaactgcatggcgatcggatcgttcgacaacgacagaacactatgggatgacattccttgcgacgagccccgcaagtacatttgtcagaaggtttga

SEQ ID NO: 962 - DNA, 3924 bp, Aedes aegypti
atgtctgttgccgcagctctggtagatggacgtaacaactttcttcgtcacgatgatgcgttaccgaaaggatgcacctggaccggtgcggtattggaagtttcgcaggagaaaagatctgatgagctgcagtgcaaaatcaaaaccataaccaagaccgagagtctgctagctaatataagtagttatcaaattgataggataaaatcgctcaaattagagtgtaacgacataatgttcttcgaaagttccttagaatcgactactacgcctggaaactttctaggcaatttaaacagtctgctgaaattgtcgatagagtactgtaaaattaagtacatcccagcgacagcgttttcgaatatgaaaacactgaaaagtttatcactgagcacacacaatattgactggtctgttatgaacctagagctacatccggatagcttccgaggattaaccgagcttaaggagatgcaccttgcggataacaacatctggagtctaccaaatgaggtattctgtcctctttacaccttgcgggtgttaaaccttaccggaaacagactgagtgatatttctcagctgtcactgtcagattggggcaaaggtccaattgcacctggcaaagcttgcaacacaggactagaggtgctagatctgtcaggaaacgacattacgctcatgcccgacaacggtctctcagcattgagatcacttaatgcactttacttgcaagagaatcttctaaaagaaatcgctgaccgagcttttgtgggtcttggaacacttgaaatccttaacctctccaacaataagctaaccgcattaacgccagaattgtttcaatcatctcgcaagattcgtcaagttaatctacaaaataattcgctttcggtgttggcacccggagttttcgaaggactagaccggctcgaaatgcttgacctgtcgcgcaatcagctgacctcgacttgggtcaaacgagacacattcgccggtcaagtgcgcctggtggtattgaacctcggctataaccacctcactaaagtggaccagcatgtgtttaaagggctgtacagtttgcagattctgaacttggagcacaatgccatagaactgattgccgacggggcgttcagtgatctgaaaaatttacatgccctattcctctcgcacaaccgtttgcgacagatcgaaccgtaccatttcagcgagttgtacgttctgaatcagctgatattagaatcgaaccagattgcatacattcacgagcgtgccttcgagaacttaacccatctacatgatttaagtctaaacgataataggctggaagagataccgtccggtatgaagagtttgaagtttctgcagtcgttagatttgggtaaaaatcaaatatctgaaataaataactcatcctttgaaggattggaagagcttatcgggctacggttagttgataatcagataacagaaatttcaagggacactttctttgcactatcaacaattcacgtgctgaatttggcaagcaatcggatacgacacgtagaccagtcggccttcagttcgaatccaacgcttagagccatcaggttggataacaatgaactggaggatgtagcaggagtgttcacctccctcacgtcgcttgtttatttaaacatctcggataacaacattggttggtttgactattcgcactatccgcagtcgctcgagtggttggacatccacaagaacaatatatcagagctgggcaatcggtacgacgttggtaattggttccagctgaaaatgttggatgtttctcacaatcgtataaagtacatcaattcaagctcgtttccgaaaaatatcgaaaccttgctgttgaacaacaatctaatcgaggaaattgccccggagacatttaccagcaaggagagcattgtgaaggtggttctttatggaaatcacttgcgtcggctggaaatgtcatcactggcactgacactggtccctgatacgcgaactatgcctgagttttatattggagataatttaatccactgtgattgcagcatggaatggttacagcgcatcaacgagctgagttaccttcgtcaatatccacaggtgaaggatcttgattcggtgatgtgtacaatggagcacgagcgcggtgagttagtcaggcccctgatggaaatgaaggccagtgagtttctgtgtaaatacgagagccattgtttcgcaacgtgccactgctgcgattttgatgcgtgcgattgcaaaatgacgtgtccagaccggtgcaattgctatcacgacacagcatgggagtccaatatcgtagactgcggcagtgtgggattaaattcgattccggttaaaatcccaatggatgctacggacatttatttggatgggaataatttcggtcagctggagagtcacgttttcatcggcaagaaaaagctaaagtcactgtatctgaacaatagccacatcgatggcctgaataataaaacgtttggcggaattccggcactcagtgtgctgcacctggaacacaatgggctggaaagtatcagtggagccgaattcgagcagctgcgtgaattgaaggaactgttcctggatcacaattccatcagtgccatcggtaacaaatcgttctattatcagaaatcattggaagtgcttacgataagtgacaataaaatcagtgaattgaagccctgggaactgatgccactgggcggtaggttccggctaatctcgctaagtggtaataaactggcctgtgcatgtgaatcgatgggtaaactagtggactgggccgagcgacagtttaacgaaacgaacggactaagtgaatttcagtgttcgaataataaattactaaaggacgcgattaaggagtgtgagagccacaagagtgctccgattgcgacacctaccgtgcagcggacgattatcgataatgattttatagactatttgccactgttgattgccgtgctagccggactagtgctgacgattctcctggtgacgctggtgttcatcttccggaacgatgtgtgtctgtgggcgcattctcggtacggagtaaggatctgtaaggatccgctaaatgcgatggagcgatgcgaggatagtgagaagctttacgatggatatcttgtttatagtgctgccgatgctgatatggtcactagtcaaattgcacaagaattggagcataatggttacgcactttgcctgcactatcgggatatacactcggcagcctttctggcggattcactacaaggcgctgccgacgcatcccgcaagttaattctatttataagtgtgaaatttatgcaacttgaatggtctcaaccagagttccgagccggattgcaagcggtgctagagctaatccgaccatcccgacggaaacagaagcttatcctcattacttcggtgccccaatcgatgctcacgatggatcccataatggatatcctcacgcgaacctgcaccgttatctcgtgggacgatcgtcgattctgggacaagctccgttttgccatgccggacattggcaaaaattcccctgtaaataaagcccctcatcgcaaagccattaacatccggtatactccggctccaacaaatcctaccgcaccgacggccacctggccaaaacgtctgaactctgaagtatgcgtacagtatccaccgcagtcggctcattcccccaaccacagtacttacaacaccgaggatgaactttcgactgcttcctcgccacagtacgaagccccaacgcttcaccacgcatccaacaacaccaacaccctgggccacgtgtactccaccattccggagtcgcagtacaacacccatcactccaatcgcagcgatagcaatcgaccgtactttgtgtaa

SEQ ID NO: 963 - DNA, 1161 bp, Aedes aegypti; identical to SEQ ID NO: 1

SEQ ID NO: 964 - DNA, 1308 bp, Aedes aegypti
atggtcaattctacgcccgtcgaagtttctctaaacgaatgcgtagatttgagcaaagtaccattaggtgcattgaattacaaaacgtatgaactgctgtcggcattgctaaatagaaagaaaatatttaaatcagaggacggctattatcgtgattggcgagggttgtttcaagtactcaaattggataactatctggtagcagagctggaaaaccataacaatccaacgaaaagagttttggatctttgggagaactcattgaaaggagctaatcttaaggaccttcaaaatgtgcttggcttaatcgacagatgggatgttttggacgatagcaataagttattttatgacgacgcagaaaagtttctttccaaaaccgctaaacaggtcagtacagatcaattagaggaaacgagcattggagcggatgaagacattattacaaaagatgatactcgacaaaataagcagttttacgatgcgttcattttgtttgctgatgctgacattgaatttgctacaaaaatcatggagcgcatggaggagagaaaattgaagatttgtataaaggatcgagatcttcttgccggtattacttttgagcacgaagctatcattaagctgatttctgagcggtgccggcgattggtggttgttatttccagagaattcttgaaaagtccgttgaacaatttctttgttatgtacgctcaagccttgcaaattgaacaaaagaaacgtaaaattattccttgcgtgtacgagcgattggagcttcctgcaaacctaaagttttatttcattttggactacaagcgctcgaacaagctgtacaatttttgggacaagctggaagatgccataaaagttcgaacagattccccggtgactgaaattaagaatcaatcaaaagcaatagaaactgtaagcattccaaaaataacagttgaagatgcaaacgaatcatcggcagataaagttgatcgaacgcaaaccaaaccagaacaactcacaactggtacatcccattcagtttctcagcccatcaagaaatcactatcatcgtgggatgttagcaatgcgctcaaccgtgtactaacaagtaagtctaagaatgcatcttcgagtacatcagaacttccaaccggtgccgagaacagtgatcaggaattgaaaaaagtaaagtggtattccaagctgggtttatcgtccagtaagtccagcttggatggcaccggcgaaaaatctgagaagaaaaagacgaagtggtacaaaacaagcaaaaagattgcaactgctatgtga

SEQ ID NO: 965 - DNA, 1719 bp, Aedes aegypti
atgacggaaatcaagtctactatcaaggagcagaacgcgactcagcagcatggcacttctgatatggttcatagtaacagtgctcatcagaacaattcgtcggcaacttcaaattctaaaaagcatctaaaaaagcaaacaagtgcactggataatatagcattccacctagggattaaaaaggcagataatgatcacatcgatgatcgcaatctttttgttactttactgctattaggtgttttagtcattctttttattgccagtgtgactggttttttcgttatgtggttcactgatatatatgacaattctttattggagaacctaaaactgagccacaaatcaacagcagctgaatggtgggagaaaccaccagtaaacccactgctaaaggtacacatattcaactataccaacatggatgattttttcagtggaaaggccgacaaactcaaagtagtggatttaggtccttatgtgtaccacgaaactgcggaaaaagtgaatgtttcatatcatggaaatggtaccataacctataaggagctgcgatcttaccaatttctggccaatcaatcaagtggaatgcagtacgacaaggtcgttgtgccaaatataccaatgataacagcaatttcacaaagcgccgatgaatctttgtttaaaaaaatggtgttgaataccgctctctctggcgttgatgcaaaagccttcaaagtcttacctgtagatccatttctatggggatatgaagatgatctattgaacctagcaaaaaagttttcattcgacaatgaaatatcattttctaaatttggtatacttatgacgcgaaatgggacaagtgctgaaacatttacgatatattctggtgaaaatgacctaaagcagctggcgattattaaggatttgaatggaaaatcttcactagatatatggacaaccgacgaatgcaatcgagtagatggcacagatggatcacaatttcctcctcatctgatggataagcgacaaactctatatgtttttattaaatcattgtgtcgcaaatttccgctgcgatatgaaaaagaagtgaccttatttgatggaatacctgcatggcgttataaagcaccaaccgatgtctttgctcatcccagtattaatgcagacaatcagtgcttctgccatttgggttctgcttcttgtccattaagtggtttattgaatgcaactctgtgttcttatggagctccaatttatgcatcttttccacatttctatactggtgatagaaagctacttgaaatggtggaaggtttggatcctcagagagagaagcacgaaacatttgccgacattcatcctagactagcatttccaatagatggtgcttcccggtttcaaataaatattcaggtgaaaaaaacatcatacatttcaggtttagagccattcaatgatggacaaattttaccagtcatttggcttgaagtggtacctggtcacatatctgaggaactgcggaacatgatttatcacagtacattcagtgcgaatgcgatacaattctcgttcaagtatggatctttacttatctgtgtgacaacatttgcacttctagccatgacatgctatttccgtacgaaaaatgcagatgatactaactctgaaaagcctgaagatcagcctactgtgaaacttaactcaatgaacagcgaaataaggtcttag

SEQ ID NO: 966 - DNA, 6050 bp, Aedes aegypti
gtttcagattttttcccaacccgatggttaacactgttgcattagtactttggaaaatcgtagctatagtcacaatatttcttgcgttctgaacttattttgtttacttttgacggttaagcttcacagaaaaaaacaacagttgttttatacgaaaatttggaaaaaaaaatttggataaaattgtaaggtacaaaaccaatacaaaacagtacagttttctgttacataatatcaaattgtgcttgatttgtatttacacacaagaataatgttgcttacgcattcgattacaatacgttgtattgtatctaatgaagacattgtattgtacactaatggtttattccattcactgaatggtacgtttttacccgggtaggcccatctactttttcaaaaacgttttgacatttcttattctatgtcagtatcttgaatggcattcaaagggattcgattatctggtgtgtcgattctgtgtttttggactatttccatgtttcgaataataattattgatgtttgcatttgagatgcaaatgttgagtaaacgtcctcgaaatgcgcatcatttaaaagcgtgtgatgtcatgaattaagcgtcagtgaggtgtaggatttttgagaagatgtgtcctttactgattgccacattatacttcatacttcagtacactgcacctgcaaattcaagcgaagtgggccactacatcatattggtacctactgtaatccatgaccactccaaggtgtcgatcggcctgtctactgtaggttatgaggagaacaagcaatttcaagtgatactgaaaaaggagcagtatgatgataaagaaggagaagttgtaaatgagaaacatcgtcaaagtagtgatacgcgactagttcaatttacggtttcatcacttgataatgaaccttatcagtttttaatacacgatcccgatggaagtgttcagacaactcatgtggaagtctcaaaacgaccagtttttatttttatacagaccgataaacctctgtacaagccaggagacacggtcaaattccgtgtgctagttcttaatcatttgacgcgacccatcgactctttgaaagttatcaatgttcagctcaaggatagcaacagcgatctaataagacaatggcattatgcacgactccaaaagggagtatttcaatcgcagatagatctcgcaaatttcgtacctctcggtaactggacgctcaaagtttcggcactaaatggtattgaagaaacgaaaacgtttaacgtagctgaatatgttcttccactacacgaaatacatattactgcctcgaaacaagtccaaatgaatgacgaaatactgaagctgattatagatgcaaaatatacatttggcaaaccaatcataggttatgtgactttagctttcaacgaacttaattaccctgacatgtatgagattaatggacgagctgtgattagcattcccttgagtgatatagttgacacggatgttggcgatgatgtgtaccaccttaatgtccaggtcaaaattgaagaagatgaatccgaacaaatctacgaagcaagtgaaacaattccaatccacaaaagatcttataaaataacgctacggaaatcttcagaatatctgctagaagaagaatcaatatggtgttggctaacgataactaatcctgatggtatgcctctaacgaatcggaacgtgatgacagtgaaggtcactgagatgttaggatcccggtccaacaagcattacagttttcaaaaggaaccagatgatgagggtgttgtaagcctgaaaatagattcgtcaaatacgaccgatcgactcgagttggaagtcacgtatgaaggggaaactactaaatttgaaattctacacggatcagataataataacacgcgcaacgattttatcaaagcttccctgcttgttcagaaacccatgttgaaacatccagttgaagttttagtgcaaagttcgtttcgtatgaatctagttatatactacgtgatatcacaaggagaaatattggccagtgggaggatttccgtgaactttaaacgaactgcaacttttagttatttagctaccttccccatggtaccggaagccagtctagtcgtttttactataaacgatgcaatgttgtggaaagacattgttagattcaaagtgcatgaattggacaatttcgttgacatagaaatatccagcaacagcgcagagccacgtgcccaaatttttttggaggtaaaatcgaatccagggtcaacgataggtctgctggcagtcgacagaagtttgctccaactcggtactgggaatgacatcactcaacagattgtgcttgaaaagctcggtaaaccaaagattgatgaagatgttgaactggagcgtttaggttttaccgtattgacaaatgcaaaaagccatttcatggcgagcccgctgggaagctcacctcacctgctgacccaacggtttggtgatgatgaagagcttcacttaggccaagatatgcaagcagaccatggaactcgtattcttcgaaagaattttcctgagacctggctttggacggaaatgatagaagtggatgacaagggacacgtggatatcacagacatcataccagacaccatgaccagttggtcaatcagtgcctttgcaatcaacacgaatcatgggctgggagtagtaaaaaatccggttgctttaactgtgcttaaacccttcttcgtcaccgttaatctaccgtattcaattgtaaaaacggaacaagcagtcgttgaagtattcgtacataattatttgaaccaagctcagcacgtcacggtacgagtacagaacgcacaaaaagatttcattcattcggacctggaagtttcaaaaacagttttcgcaccgagtaacagcgttaaaacagtgacatttgcattgaaacctaagcgatctgggaaccttacagttacaatattagccgattgctccttagcgacagatgccatacaacgtaacctccgagtgacgcctggtggattgcaatactttgaaaattctgcacgattcattgaagttcagaactcatcgatgtcgttcgatcctatcaagttggtaataccgagaactgcaacgtatggatcggtatcaattactttctcagtcgagggatttttgctaggagcagctctgactaatctcgatcatataattcgattgccatctggctgtggtgaacagaacatgctcaatttggtgccaagtgtgattgctttggaatacatggacaacactgacacactgacctacggtatcaaagccaaagccatcgattatctgcagaaaggctaccagaatcaactcaagtacaagctaagagatggatcctttagcgtctttggtcaatctgacggtcgcggaagtgtatttttgactgcactagtagcgaaagtattcacattcgctaaaagacatataacaatcgacaattatgttatagagaaggcctttaattggcttcgggaaaggcaattaagtgatggacgcttcgtagaatctggacgaatatactacaaagagttacaaagtggtgtgcaagatggcacaacattgacggcttacactttaatagcctttctggaacataaatcacttactcagaaatacttgtcagttgtaaataaaggcacagaatacattgccaaaacgtacagatttgatggaaatccatatagtcttgctttaattgcatacgtactccagcttgcaggtcatccaagaaaacattattttttcgataagcttgtagagctctcaaagattaatgaggatagaactatgcgttggtggggaagtgggtccaccagtatcgagaccacggcttatgtcctgctgacctacatgagtagaggatcgtacattgatgctaaatcgatcatgagatggatggtgtcacaaagatatgacaaaggagggtacagtaacactcagaatacgtttgtaggtctccaagcactgggaaaatactcgcgtgtcatgtctttgtcgaatcaaaattacgatgtcttcgtaaattacgatagcgaacgccaacggctgcacatgaattctacgacttctctagttggacataaatttaatataccgtcagatgtacgacaagtcaaagtagacgttgaaggcaccggtgctggagtatttcagatagcacacaaatataacaatattgctcatgacagtgtgccacgatttaaaatagaaaaaacattgttcaaaatccgttctgacggtgttgccaatatgacaattcaggccatttaccgaccgaaaaaagattttgaagaaactaacatggtcatgatcgaagttatgtttccaaacggttacgttgtaacaaatagccaactgaagcaactcgaaaaaaacaaccaaattcgacggtcagaaactgcagatggggacaccaggttgattctatatttggatccgatgcggccaaacaatcccgtctatgttgatgtggaagcatttcggaaatcaactgttctaaaccaggctccgggatggatcaaggtttacgactattatgatcccacacgggaagccatcgaatatttcgatcccatttccaactaaaatatttcaaaggcttaccagaagcattcagtataattttgaaacatgtaatgcatttacgaaaggtgttaagcattggcgtaggaacagggaggccagttcgccccagaattttgtatgataataagtataaaagtttaacacaaaaaaacacgattcttacgcgaaaaaatgttctgaatgaattaacattactcttattattgacaaaaaacagtagttacgttcttctattatgcacagcagtagttgaataatttcacttgccatacatattggcctaagatggacacacgaacccgagaaaaatgaaggaatacttttgcgtaggcagagccgtagcgtagcctcacggcgcccttggcgaacctccctttgggcgcccccaagtcaatttcgttttcataatgcaagtgtgtaagtgattttcgtaaaacttcccatgtaaagttgatttagagtgggtcgatgtatgtcgtataaatgttataaattatgtatgtatgtatgtcgatttaatgttataaattataacatcaatatggctcatgaggtgctcttccttttttttaaattagtttcaactgtaattatacagtaatgctatctttactcataccgattacacgattcaattgcagcttcagcagcataattacttgggataaatttcaatagccattgaagactcttttgaaactattatcgaaatcaacaaaataaaatcatgttgacacttaagtattcacttgttcagagtacatttaaatattttgtaattataaatagaaggtgtacacgatagtccttctttagaactgtagaagattatcttaaagatgctctgaagtaaacacaagaaaattcatgaggtgcatctgcagaaacaactaagaaattctttttcaaatcgttggaccatttgttttaatttataaatgtcttaaaaacaatgtttatacattggtttcaaaaataattgcaaaggcttttagaaacgttatgatgaatttgcataacaactcctcctcaaaacatttttttagttgtttttcgaagagcctcccaataaatggaagcagattcaccaaatcctttaaataaagtcaaaacaatttttttttgtttcgacgaaatattgttaagaacttcaattcctaaatagtaacatgtaaaaattggaaattattctattaattgaaaaaaggcgatagagacaatcgcagaattcggtgcgattttttaaacacttttcactcaatagcctgttcttagtgatgtttttgtaagaaattcactagagtaagactgcaacagttctagaacacccaacaggtgaaaagtgatctaaaatatattagtgctatatcctctccacaaaatcaaaaattttcg

SEQ ID NO: 967 - DNA, 675 bp, Aedes aegypti
atgaagaagaccactcgaatcttacacaaaaaaaactggtttatctcctctactcagtctaagtcaatcccacaccgtgataagatgtcaactttcgtcaaggcggtgcttcttgttgtgatcggcttccaggcatggatcgccctcgcacaggatcccaacggatgtccgaacattgtcaaacgtgccggatggagtgcctccaaatcgtccaacgttacctaccagatcaaaccggtccagcatgtggtgatccaccatacggcaacgcaaagctgcaacgaaatgcccgtctgcaaggagatcgtcaaatcgattcaggatcagcaccagaagcagaacaagtggagcgacattggttacaactttttggtggccaatggtggaaacgtgtacgaaggaattggctggcatcgagttggagctcatactaaggggtacaacagtaagtcgattggcatcgcgtttattggagacttcacgaaggagcttccatcggcgaaagcgttgcgagccgcggccaaacttctgcagtgcggagtaaacatgggagagctggatgaaaattatctgctgtacggagctaagcagatttcggcgacggccagcccgggtaaggcgctgttcaatgagataaaggagtgggatcattacgatccatctccagtgctgtag

SEQ ID NO: 968 - DNA, 1204 bp, Aedes aegypti
atggttcggtgccgtttttgggcgattttgttcgccgtgatatattgcttcaaggggattgcgtgcgcggtaggttcagcgttgtcaagtagcagcgaggcagaacccggtctcgattaccagaagctagttgcaaaactggagatattggacaccaaaatcacccgcgtggaagtgtcatcacgggagcaattttcctcacttgagtcgaagcttgataagattttgcaattggttgataatcttggccagtcgatgcacacggcacagaaagacattggcgctgctagagaggagatccagcaattccaaaatcactctcaaggtcaattacaagcactagccggtagtgtatcgattattgagtcacttttagttgaaagtcaccgacagaagcaagttcagccaacgagaagtgagtcgactgcgattcgcaagacggttccagttgagcaaagatatttcgaaagctgcgatgttgcgccgaggaatgtgtccggaattgctagacttctacccgatcttggatttggtgaaccattctttgtgttttgcgatcaagattacgaaagtggagggtggatagtgattcagaatcgttacaatggttcggtaaatttctaccgcggatggagagaatacaagaatggatttggaagtttgaatggtgaattttggctaggtttgaacactattcacgctttgacctattcagcgccatatgaattgcacgttttgttggacgatttcaataattcgacggtagtggcaaaatactcactgtttgctgttggcaatgagcacgaatccttcgctatcacgaagcttggtgactatagtggaacggcaggagatggtttatcttaccataggggatcgaaattctccacaatggatatgaacaatgatattccaggaaataatggtggagtagactggactggtgcatggtggtatcgaaaaggacattacagcaacctcaacggtcagtatttgtccggaaaagtcgatcacacgaagtttcatgggaaaggtatgacatggaatcccttcaaaggcgatgattactcgttgaagcggtccaggatgatgatcaagcgtatattgtagtcagcagtagatagtcaacaagcattacatgattcgaaacattgttcctcttttatatcaaaatattccaaatttatatcaattgaaaaggtat

SEQ ID NO: 969 - DNA, 1301 bp, Aedes aegypti
atggcaaagttacttgttctgctagtgttagcaatactcggtgctgtggccaacagtgccagtaatgaaagatgttcaggattcggttatgaacttctaatggcaaagttgaagttcatggaagagaaattacttgaactccaatccaatgggggatcgaaaaaggaaggaaaattccggctacacaatcgagacctcaaagaacggaatcttccgcagcaaatcaggagcgtattggatctgcaaacggatactttgtacgctgccttcatgacgagcctgcggaaactgccatccaacactaccaaactgtggcatgcgtatttggaaggaaagctcctgaagtcgtgccagcagtctagaaagaaagtttcaggacgcttttggttgagtgaccatggattcgaagtccactgtgaactagctcagtacggtggtggctggactgtgattcagaacagattcgacggatcggtgaacttctccaggggttgggacgactacaaggaaggctttggcgatctggacggcgagttttggttgggactggataagatctaccaactgacctcaacaaagaagtgcgaacttttggttcacctggaagactttgatggattggctaaatttgctcactacgttcggttcgccatcggcagtgaagatgacaaatacaagttggctaaattgggtagatacaatgggaccgccggaaatgccttagttggacataaaggattttcgttcagtactgctgactcagagtttgttggtgcgcattgttctagaactgaaccatctggatggtggtatcccagatgctatttttgcaatttgaatggattataccggaatgtgaaagacgtagatgcaatgacgtggtatagtttccatagttattatcgtggactgcgtgtttcaaagatgatgattcgagagatttaaattaagttcagatttaataatgatgctaagttgctacctgtaatgtaaacgaagactattatagacggatttcacgccaactcgacacgcgattggcagcaccctttcagaattcaatgaaactttctggatgtcaaaagtatgttaaactaagatactttgcatattttgtattttcaaaatcgatctagactaacatttgaaaagggtcaaagtttttttttactttttttataaacccatataactcgaaaacggtaagacctacaaaaaaatgttgtatgggggactgtcgtgaaatttcctgaagttttagaaaaaaatattgaaaaaataaaaaaacattttctacaccg

SEQ ID NO: 970 - DNA, 1344 bp, Aedes aegypti
atgattacagaatgtgctgtaaaatattacagacttcgagagtacgaagatcgcgtcgctgtccagcgttttgagggttatcaatcgatacagatgcagaatgcctatgtttcctcttctgcaaacaataaatacaaagctagaattggacactacgttgaagatcctttgatagaaactgttgttacctacaattgctacggaactcttatacatcgcgaatttgtgctgacctcagcgagttgtatcgacagcttcaaggatgaatcactcatagttcaaatgcgccaagaaaagaagttctatctttctactaatccggagtatttgctgcaagaaaaaagcgattatcgagaacaggttacggtttcacaggttttcatacaccctgagtacagcaaagcacctttgcagaatgatttggccattttgcttcttgatccagttgaactacaatttgacgaatacttcggaccggcatgtctatggacgcacgattcaactgaaataaaagaattccaaactaacggccatggcccgctaaggacggtccaaggcctagaggatagggttgaactactgttgaaagacagaaccgaaactgaactgtacttgatatcgaaggtattgaaggattgtcctcagatgttatccaaacatcaaatttgtgtcggagaagatgccactcttgtccctggcacttgtaagtcaaaccacggatcagcgatgtcacgtgagcttagagatttgcagcaggttttctatgactacgtctttgccatcaacagtcaaggagatgattgtggccttaatacaccttctacgtttaccaggatttcaccgtatataaagtggatagacagtattatctttggagaaaacgttcagttcaataactcggacatctactatggagacgaatgcaatcttaaaggtggtgaatcgggagtttgtttaacgattccggaatgtcctggcattgtggacgagttgactgggaaatcacccgcagaagtgaaaaggtgcggattcatgaacgacgaagccttggtttgctgttctgcggctgattccgcacaaaacaatctagagagcgcacacctcagtgaggtgatcaaggagatcgagcagtgcccggatctttatgctgatctaagatctaataggtctccgtacaatctatggaaaggtgccgttaccttcttgttctcaactgaacatgttgtgttctcacattactacattggcgacgaggatttgttcgaactcccgtaccgggttgaaaaaaagagaaggtggacgaagaagaaaaatattgaccaagttgaaaaacatttgtgctag

SEQ ID NO: 971 - DNA, 1449 bp, Aedes aegypti
atgagattaaaagctatcagcacggtacttcccctggtttgctttacattggccgggctgtcagcttaccgctgcttggccgctaaaggagtgaattgtgggcagcgtcagttgagcttcctggctttaataaagtcgggaaaagccgcaaatgaaggcgattggccatggcatgcagctgtttttaaaaaggatgtcggatacatttgtggaggaaccataatcagtgaaaacttcattttgacaggagacgaagacaaacccatcgatatcctgcaagaagcaacactttccgtggtagatcgtgccacgtgcctgaagagcaagccattgcatttcgagaaactgctttcggaaaataacagcaacttttgtgctggtaaccgtaacgagacaaatgtgtgcgatggtgatagcggtggtggaatgtttttcgagcttggcaatgcttggtacatacgaggtttggtcagtaccggagttcgttccaaaaacagcagacattgcgatcctcagcagttcgtagttttcactgatattccatattatctgaagtggatgcacgatcaccaacagatggctaagaaacgaaatttactagatttgggtaattgtggactagatgaacatagcttgacgacgcaagaaattgacaaaccagtatttttacaatatccttggacggtaatgctggagttcaaaggagatttatccacgactattcacccattctgcaacggagcactcattcaccctcaattcgtagtcacggttggacattgtgtggatagcaatttgaaaaagtacaaacttaaatcggtacgcttaggagaatacaaccagaagacgaaccctgatgtcggtaaaaagataaacggaaaggaagtcagtactaatatacaatcaatcgatatagaaaaggtgttcaagcatccagagttcaataaaccacgctacgataacaacattgcactgctgaaattgaaattccctgccgacattgatcgacccaatgtgaaaccaatttgcattccaactctagaagatcataatgagcagtacgttgtcagcggttggaaacgtgttggcaaagagtctcatgttttgactagagacttgactttgctggaagatgctgacacttgcagagaagtctacaggaagttcaatattcatacgtcggtgaaccacatctgtggaacgtatttccaggaagacatccagcaatgtttccattttatgagtggtgcacctatgcagtacgtaaaacgagttgaccagaaaaatcgttactttctgaaagggttgttctcgtttggatttcctggttgtatgctgaactatacagacgtctttacgagtatccacaaatataccgattggatatcgaaaatcgttgatcaagaaacataaagaagatagtagcataataaactggttttgagcgcc

SEQ ID NO: 972 - DNA, 1287 bp, Aedes aegypti
atgattggaggcacttgtatgctgagtggtcaatgtgaaacccctaataatggcactgaaaaatgtctaggaccagaacatgtatgctgcatggataaagttgaatcaacaacaattcgggaaacggcatctgaagctaagacatgcttaaataataaaggagtatgtactgaagaaaacgagtgtgatggaaaaatgtataacgaccgaagaaacgaatgtggtggtttagtctgctgtagtttaccacaagatactgacacaagttctgaaagcacttgtgattcgttgggtggtacgtgtaaagctgaacaacattgccgtgaaatagctgatcgaattgcagactgtgcagaagacactgtgtgttgtttatcgaatgggtcgtcagatacccaggctccaacagatgcaggagaggtttcaatcaaagaatgtggctaccgaattgaaacgggaatcaaatttaacactatcaatcgagaccacggtgaatcgcaatatggcgagtttccctgggtggtagccatcatggtgaatgaatcagcaaatgttaggttcacttgcagtggcacgctgattgatccggaagttgttattaccgctgcagagtgtgtgaaactatttagaacgaaaccagagcaactcatagttcgtgctggagaatgggacatgggagccacaatggaaccaattccataccaagagcgtcgtgtaaggaaaattaaaagtcatgtcggattcaagcctctttcattaataaacaacatagctattttattcctggaagacaaatttgatcttacttctacagtaaacacagtttgtgttcctccccaaggtttcatcattgacaatggggaagtgactgctactggttggggtactactccaaaaaaccgtaaaaaatttcaacaaattctcaaaagcattgatcttccatatgtgcaaaaaccagattgcgaaaaggctctccgaagagctacccggaataataagttcaaattacactctagctttatttgtgctggtggtgaagatggtgtagatacatgccaaggagatgcaggttcccccataatattcccaatcccggatgatcctgagtcccgatactatgcagtcggaatggttgcttggggagtcggatgtggcaggtctggaacaccatctgtctacacggacattggacaattcagagaatggattgatgaagagttggcgaatgaaagtctatcgatgtattattatgactatcaactacaaggctcgaatgatgaacagtag

SEQ ID NO: 973 - DNA, 1512 bp, Aedes aegypti; identical to SEQ ID NO: 4

SEQ ID NO: 974 - DNA, 1113 bp, Aedes aegypti
atgtctctggtaattactatcgactctagagtgctgttggaagattcgtgggaaccaattcaatgtgacttaccgggactaacgaagagaggcatctgcacggctgccagtaactgtgaggcatatcaaagaattttgaatgaaagcaggggtaactcaattgaaagggaagatttcattcaacaattacaatgtggaaagttcgaaggagaccgagtatgttgtccagatagtgatagctaccaaattggtgtttatgaagatgctgcaacgtgtggccaagccgcttatggctatcgtattcgaggtggagtgattgcagacatagatgaatttccttggatggccatgctgctaaagatgcaccgtaaatcacagtcactttattatcattgtggtggcgtactgataggaaagcagttcgttctaacagcagcccactgcatcagcccgaagaatggggattcaaagcaggatccattaaaatacgtccgcctgcgggagtacgacgtctaccaggatccggactgtatgatggccagcggtttcatggattgttccgaggaaaaactagacatgaaaccacgcaagctgatagcacatccgggctttacagtgggctctcaggaccggaatcacgacattgggctcattcaaatcgatcccattccgacgtattcggactttctcctgccgatttgccttccggaaacgggtttcgaccagggtgatcgacgaggccggatgcataacgttgccggatgggggaaaaccgactttttttccggttcgggatcgattagctggagtccaatcaagatgaaagttgccctcccattcgttgcctgggaggtgtgccgagacgtgtataaaccgatgggagtggatctgcagcgaacgcagatttgtgccggtggcaagagggcaagagattcctgcgcaggcgacagtgggtctccattgatgtattacgatatgaagaatgcagtgtgggtcctaacgggaatcgcaagctttggagttaaagactgtggaatggaggggatacctggagtttattccagtgtaaaagaacatctgtcgtggatcaaagaaagtattagcagtgcctag

SEQ ID NO: 975 - DNA, 1116 bp, Aedes aegypti
atgaaatcatgcatatttttgagcttgtgctgtgttttagtgatctcaaggtgggcatcatcgcaagagattgaagactgtctaactggcaaggctcacaaaggtaaatgcgtttcaattgcgaattgtccatcgctgcttcggattgctcaaagtccagtgatttcggaaagtgacaaattaaagcttagagaacatgtttgtggcaatcgaaaggtttgttgccgatcgccattgcaagttactacaacttccacaacaactgaatcttattcttatgatgatgttgaagaaagtcaaccaacaaatcaaccgctgttacccaaggaaaacgattgtggcttggataccgcgagccaacgaatcattggcggagatattaccgataaggaacaatttcgatggacggtagctttggattacaagcatccaagaacagggggtgtcaaatgcggaggatccctgatcaacacaagatatgttttgactgctgctcactgtgttttcagagtacagaaacaagatctcactctacgtttaggcgaatgggatatcgaacaaaaccccgattgcgaggaagaagatgaagaagattgcaatccggaagtgcgaatcgtacgagtgagtcaaatattaattcacccaaattacaaggacaagacaaacgacattgcacttttgagaatggaacaagctcttccggatgagtacacgtcgcatattttgcccatttgtatgccgctgtcggctgaactcatgcaagatgctttcaccaacagaaatgtcagcgtggttggctgggggaaaaacgaaaaagaaataagaagccgtttcaaaatgttcgctgaactgataactatcaacaatcaacgatgtgagcaagcattagagaagccacttcatgacacgcaaatgtgtgcccaatctttcacagaaactattcgtgatacctgcggaggcgattccggaggtcctttacagatacagatcaaggggacatactatctcattggcattgtcagccatggtccaccttgcgggaaaactttactgccagcggtttacaccagagtgacgtcgtttttggactggatcttacagaatattactgactga

SEQ ID NO: 976 - DNA, 297 bp, Aedes aegypti
atgcagcccctcactgtcatttgtttcctggctctgtgcaccggggccattactagtgcctacccacaggaaccggtgctggcggacgaagctcgcccttttgccaactctcttttcgatgaactgccggaggaaacctatcaggccgccgtggagaacttccgcctgaaacgggccacctgtgatctgctgagcggattcggcgttggtgatagtgcttgtgctgctcattgcattgcccgtggcaatcggggaggctactgcaactccaagaaggtgtgcgtctgccggaattaa

SEQ ID NO: 977 - DNA, 1841 bp, Aedes aegypti
ataaaaatgggccaccttagtgcgcatagataacgaacttcgcccacactggaactcggtgcatccatacaccgtttcacacagttccagcaaagctggctataccaacataatctaaccaaatatttatagaaagcaacagaagtgagtcgtcctccataagaatcggataatcgaacggtacattcctatcaagaagagtcaagattgaaacgtgcgtgtgaagtgaagattcaactaatgcacacagcgagcaagccggttgcttgtgactggagttactagactgtggaaacacaaggctggctgaggtggtgtggaaaccgctttcagagttgcagcacctaccgaccgaccaattcattgcgctgttagaacgagtgatagatactacctacctatctacgtgggtatcgcacaaaaagctccacctttcgccaaagatggcctgcaaatgtctcaagtccaaagtgctcaaagtgacactgttcgtggtgctggtgaccttcctgcccgggttgcctccgtatccgacgttcccgttcaaggcgtttagcgtaacccctccacgagacttggagggcgtcctagcgcccaaccaactactcaacaacgcagaacagtggctcgaaaaccaactggttgcaccggaaaccattctggtccgagggaacacaacctatgcgtccgttgccggaggcaaggtcttggaaatcaccaaaaacgatcagatccgggtggtggccaagttcggtgtggaatgtcagggaaactacgacgaacgcgtttgcggtcgtccacttgggatagcgttcgatacccagggtaacaacctgatcgtggtcgagccctactttggcatataccaggtgcagatcaaaaccggcgaaaagaagctgctagtttcgttggacgaggttatcgaaggcggaaaagtatcccgcaagcctggcattccgaacggtttggcagtcgctcggaatggagatttgtactggtctgatacgtcttcggatttccgctttgaagacgcactgcaggccatgcttctgaatccgtccggccgtctgttgcattactcgcgggcttccggtcagaaccgcgtgctaatcgacgaagtctacggtgccaacggagtagctctcagcaaagacgaaagcttcgtgctggtggccgaactcggaggacagctgatccgtagatactatctgaaaggtgccaaagcgggaacagacgacatcttcatcgatggtctgccgggatcgatcgacaaccttgttggcgatgatacaggtttatgggcttcggtggtgattgccgctgacaaatcgaacccatcgctagtggccatgcttgcacccttcccgaatgtccggaaattcctcgtccgcgtgatgagcttggcggagcttccattcgacttcatctacaagcagacgggcaatcaactggctttgcgagtgtccaacttcatcgggaatcttggaagcgtggcaccgctattcccaaaacgtggcacggtcctccggttggattgggagggaaacattctgacagcactgcacagcgacgatggccgcaccaatttgatagcgcatgccgtgcagagtggagattatctgctgctcggttcgcccatttatccatcgattcggaaggttaagctgacggaagaggtgctgcaaattgtgtcgccaggacgcaaggtgccagcgaaggttaccgttgataccaaaaagaagcagaaaccagcgggtcacgaagaattgtgaggtagtttatgtgaatgtagatttttaagtgtgagggttaataaagttggatttgtgtgtgaaaggtta

SEQ ID NO: 978 - DNA, 474 bp, Aedes aegypti
atggacttcagtacaactctaggagaatgcggcttctcgtttcgtcttccgaaacaacctaaatacggtgacgaaattgcaatcaaaggagttcttcaaaacgatgcggaaagattttccataaacctgtgcttggatcggccggacggatgtgacccaaacgatgaaccagaatggattgcgtaccatttcgggttggatttcaccgagggcgatggcaattgtagagtgacacagtgtagtaagaacgtcaactggaatagcccgttgttcgccgatggcgaggtgttcaacggacgaactgtgaatgtcattttgcgtttggaagaggaaagcataaaagtcttctacgaagatacacaacacgttgcggactacgaatacagtcatcagttgccgattgaacagatacggaccatcgagttacgcgatgggatcgcccaggtggaagaaattcgattgaaattttcctga

SEQ ID NO: 979 - DNA, 3416 bp, Aedes aegypti
cacaaaaggggcaaaaatttcaatatgaaatattttttaaataaaaaaaaaacttctgcaaaattattcttctcattgatagttttcaaaatatttcggaattaaaagtaattttctttaaaaaaggtcaaagtgtattgttctgagtagatatatttttcaataaataatggcatttcatatgacacttatttagataactaacacgaaaaaatcaggcacacctgtaaaattgaaacatgtgggggaaaagttcgtttaagacaatcgtttttaaaactgttacaagtaaaaatgggtaaatatttttacgcgaatgtggtcattatatttgtagccaatattttaaagttccactgtacagtatttgtatctaaataaatttaattgaattaatcaatatttccagataaacaataacgagcttttctggaaatattgattgattcaataaagtcgaattttagccctaccttgctctaatagcttttttttaatataatacaccatcagctgcagctgatgtctgtggcgcaatgagttttcatcacataggggtgacattttgggattctagggttgaactatctggctatcaaatggtataaaaggcacgtttttcaaagcaatacaatttttcgatttttggacatcgctttccccgtagtgcggtggggcaagagatcgagtctagtgtgggacaaaagttcgctaactgaagcacaaaatacttttatgacaggaatacattttaccaaccgtcggtattcaaacagacaggaccaaaatccaatggttccaatggtttcagaaaaaatgtatattttattgccataagttatttcaaatatgtcatttaactaaaagggcaaaagtttcaatacgaatattttttaaataaaaaaaaaacctttttgtttgtttgtttttttcagaacttgatgaagatttgattgaaaaaatggtggaaatggtcaattcagctctgagatattgttttgaatatttgcgaatatttgatgatgccctcctcaatatttattcacctacactagaaacaatttcctagaataatctagaataaagtatgaaaaccaaatgaattgaaaggatgcaaactctggtgaattaattagtatagtactaaattatttatttataggtgttccactaaacagctcgtagatttactatctagaaagtgtataacactgccatcaaatgtaataatattcaaaatcatgaatttttggttctttggggagctgagtactggttttcatattgatccccatgtggatttgaatttatttagaaaatgtttgaattattggttaaagatttcaacagactttattacatcgaaagattacaagaagacgaggctcttatttttgtactgttatgtgaactgcaaaatttcagaattactaagacttcctacccacattttgttattttttttacgaacaaacaagttacaaaaaatgatgtaaattccgcttaaagcagtggaacgcaaggaaaggacttccaaaaaaagagcaatttctcacgtgttttcttataaacctttcagttcaaaacgatcctccccctccttcttctgagtgctctatcctggcaccatgccgaatcatcccgcatcctaggtgtgttcgttttccctggccgcagccactggatgatgatcgatgccatcctgaatggtctgcttgatcgaggccatcagatcaccgccattgccaactatcccctgtcgagaaaacacgagaactacactgaactgcgggtggcacccatctacgacttctggaagaattccgtcaaggtggaatcactgtacgatctaacggatatatcgatccaccgaatgttgatggatttcctatacaatttgggcctggagacggcgcagcatggatttactagagaaaatgttagggacttcatacggaacgatgacagccatttcgatttgattttggccgaacagttctaccaggaggcgtatctgatgtttgcccataagtacaaggctcccatcgtatctgtaggaacatttggtttcgcacattacatgggccctatgatgggtatgatgaacatgttctcgcatgtccctcacgagtttctgcccttcatggacaagatgagcttcccacagcgtatctacaatgcagcggtatcattgtatgagcagacgttacgatccttctactacttaccccagcaggaaacgatggcacaggagaactttggacatctccctggtcctttgcccaaggtcgccgatcttgaacgacaagtttctgtggttctgttgaacagctactatccattgacgacggcgcgggctcgagttcccgggatggttcaggtgggtggactccacattaaagaacctaaggctctgccggaggatttgaagaagtttttggatggagcaaagcatggcgccatctacttcagcttgggtacaaacttgaagagttcggatatgccaaaggataagctggaagccattctgaacgtattccgatcgatgaaacagcgtgtggtgtggaaatatgaggacgaatcggtgaaggggcttccgagtaacgtactgatcaagtcgtggatgccacagagtgacattctagcgcatccaaatgtgaaggttttcattacccatggaggattgctgggaactcaggagggtgtttatcgagcggttcccatgctgggcattccgatctatgccgatcagcatttgaacatgaataaggccgtgctgggtggttatgccgttcggttgtacttcccgaacatcaccgagacttcgttccggtgggcattgaatgagttgttgtacaacccggagtacaagaaaaacatggacagggtttccggagtattccgggatcggccggtaccggccctggacgaagcggtatactggacggagtacgtgattcggcacaagggagctccgcagctgcgatcggcaggattggacttgccgtgggttagttttgtcatgttagatatggtggctctggtggtgggggttgtattagttcttgggtgggtgttgaggaagttagcacgtgctttcatatgccgcaatgatggaaagcgtaaaagaaaagccgaataaagcgttattaaagtaaatactgcatgtgtttgatatttctttggatgacggtatgataattgattgagcacctcctatttgaatatgtctgtcatgtaaaaaaattaataaacattactaaacaaaatttaaaactgattcagaaccgcaataaatataatgaaggaattgcataaatttagactaaaaattagacaaggcaagttattatgggatccataataatgatttgatgaacttttattcaagaaaaacgctaattgaactttataac

SEQ ID NO: 980 - DNA, 3001 bp, Aedes aegypti
atttgtttttcttttaacgtaccttccaagattccaatcgaataaaaaaatcattcaaagatacttacatgattttctccaagagttccaatgtttcttctggaacttgatttagaactacttcgaggattacttcagaaacgtttccaggaatttctcaaggaatccaaacaagggttctaactagaatgggtcttattaaagaaaataatccagtaggatattttgagaaaaaccttccggaaattactggaggtttcctataggagctgtttcgaatattcgttaaaatgttgctggaactcttgtggtaatttccgtttctagatgatctaccgaaaacacaacagtaattatacaatgattagtataattaaaaataatagcatcaatcacttaaccagaagataacgctatgaatgaagaagcctttaatttttttttcctttttataacttatagctttaatgcaatgtttgaacgcagatagttcccgtcaatttagacgaaacgtgcctaagcttgatgccttactttatgacggtatcataaaataaaagtcatccacctagtctcatcgattagcagcacgtgaagttaacgtcaacaaaactcatcatgaatgcacaaatccggttggatgaggtgagacgtcgtcgccaagatgaaaccgttgctcaaccgaaactgctgggctgtgatattggggctgtttggcctggtgtgcgatcaggcctggtcgtacaaaattctgggactattcccacatccgggcgccagccatttccacttcttcgaaccggttctgaaagggttggccgcggctggacacgaggtgactgtcgttagtcacttcccgaaagacaacccaccgccgaactatgtggatataccgctggaaggaatgaagttgctgtcggactcggttagctttgagctgttcgagtaccgacccgccttttctcacttcatggagtttttcatgctgtacgactggggcaagcaagcctgtgataatgcactcaattcggccgccatcaaacaggtgctggaatctaaagttcagtatgacctgatattggtggaacaattcaacaatgattgtatgctcggtgtggcgcacctgttgaacgctcccttcattggactcagtagctgtccgctgatgccatggcattacgaccgagttggcaatcccattaacccatcgtacatcccagccctgttcatgggctattcggagaagatgagtttctcgcagcgaacggctaacttcatcaccgcgcaaactttcaaggccatgtacagctggttcaacgataatgccgctaatgccatgatcaaacagcgattcggagatggtatgcccgacatcaaggacctccagaagcggaccagcatgatgttcgtcaatcagcattactcgctaagtggaccaaaaccgttgactccggctgtgatcgaaatcggaggtgctcacattcaggaatttaaggaactcgaccccgaactgaagaaactgctggatacggccgaccacggtgtaatctacatcagctggggctcgatgatccgagctgaaaccctgccggaagacaagcggaatgcgattctgagcgccctgggctcgttcaagcaacgggtcatctggaagtgggaaaacgaaaccctaccgaatcagccctcgaacgtgtatattaggaagtggctaccacagaaggaaatcctatgtcatccaaaggttcgtgtcttcatgagccacggtggactgctaggaagttctgaaacggcgtactgcggcgttccggtggtcgctactcccatgtacggcgatcagtacaacaacgctgctgcactggaacaccgcggaatgggcgtggtcttaccgtatgaacaaatcacccgcgacacggtctacgactcgttgaagaaagcactcgaaccggccaccatggaaaaggccaagcaagtttcgtactcctaccgtaaccgaccgatgaatccggtccaaacggcggtctggtggtgcgagcacgtggtcgccaccggaggactcccgctggccaaatcctactcaaccgaactgccgtggtacgtgtaccacctgttggacgtaaactttgccctgcatgcgttcaactttgtgtaccacctgtgctggttctggctggtcaagcgcgtttgctgtcgaggcgtttcggcgttcagcgaaccaaaagtgaaaaccaactagtgggttgggcgtcggattcgaagcgtgaaatagactgtaatagcaaatattctgaaggcgggagaattattcacttagcctctgtgagttaaagcagtgaaaactgcaagcggaatgttagttcgaccggaaactaaaattcacaactaaaaactcaaactttttagataacacctatgttaaattcatagagaatattttagattatcgttccagtgtattgcagaggttatgtttttccaactatttgcttttagctattttcgaaaaatagtttaatagtaaaaacaactgcgaaccttacaactagttggtaggtactttttgaaactgatggaaacgagtagtgtatgttctaggggaagttcgaatggccagaaaagagagtagtttttagttagttgactatcaccagtgtaaattttatttcttgtaaaaatatctgaacctaatgtgtacaataaatcaccacattttctaaatgccgcgacggaacaaagataaagattatctgcttattaaaacagctttttttatacttaaactagatttgtagtgtcgaccaagtagcttggtttacagtttcgcccgaagctcctcgatgcgcgaatttgcactcttctgcaaatccaccagcttcattgccagtcccatgttgccttgcactttgaccttgccctggaagaaggccttctgggggttcagcttgccggaaatcagatccactacgtcgatgtcgtttatgatgaaggtgacgtcgggtttttc

SEQ ID NO: 981 - DNA, 1991 bp, Aedes aegypti
atgaatgtcgagatcacgccaaactattcgtacatcttcgactttgaaaatgagttcattcatcaggatacacgtgtctggatggtcaagaactggacctacgtgttctactactgtggaatctacatggcggtgatcttcggaggacagcattttatgcaaaataggccaagatttgagctacgtggattattagcgatatggaattcattgctagcaatgttcagtataatgggtgcctgccggacagcgccagaactggtacacgtgctgaggcattacggtctcttccattccgtgtgtgttccaagcttcatcgagcatgatcgtgtaagcggtttctggacctggctgtttgtgctgtccaagctgcctgaactgggtgataccgtgttcattgtgctccggaagcagccgcttatcttcctgcactggtatcaccacattacggtgctgatgtattcgtggttctcgtacaccgagtacaccgcctctgcccgttggttcatcgtgatgaactactgcgtgcactctgtgatgtactcgtactatgccctgcgtgccctgaacttcaagcctccccgttcgatcgccatggtgatcaccacccttcagctgactcaaatggtcgttggctgtgccatcaacatttgggcccatggcttcctgcaaacggccggcaagggcagctgtaacatctccgaaatgaatatcaaactatccattgcaatgtatttcagctactttgtcctgtttgcccgtttcttctacaagacctacctctcaacgaatgcgcgcaagggcaaacgctctatccagtcagcttccagcaatggaagcgcttctgttcaatacagtagcatcagtagcagtaaacaggcctccatgggtggctcaattaattccaatctgttgacggcagcacaacaaaccgataaggttaaagcacacaaaaaaccaagaaatcaaatttcaaccgggatcttctcttatctgtatttacgtgcttcttctcgtgtcaccttcctttcctcttacgcggaaagggaattggcgccaatagcattcaacaccacacttaggtgtacacgtcgttcaaatgcagttttagtggtgcagctaattaagtgagcgtagcggaaagtcagaaaaaaataacgtagctcaaagaaggatcctgccgtcttagtctaggcgttcaatctgctccttaatttagtgacaatagcaagtagagacaaggataagcccggtgacactcatccaaggcaaagtagtcactaaaatccccaaccaagcagaccgaagactttctttttgttacgtttgttttttttggtcacaaaagatgcataccatttactacaacatactatagcgtaacagaacattcaggtggaatatgttaagagaaaaaatagcgtagaagagctaaagacataatagtaggagcgaaatgatcaaagcagaaggaacatcgttttgagaagacagcagagaagacaaaagtgttgtaaggatgagatttatatggcttacgggtgttttcctctggccacttaactagaagtcggacagcagtatggtacggtacgagactaaacaagaggactgacaggagttacagcagctggcttcttatttatttccctgggagggtagggaatcctacattagtttttttcgtttatttaaatctgtttgtgtattattcttttctcatcaagatgtgttagctaatctcgacttcattttcctaactgggaaaaggttttcgtagaaaacaaaaaaaaaattgggtagtaatctgttgtttcgtgggtgtagttttagatggctttcatttatggttactgttaaagatgcaattaccgaatactggtacaaatattcgaaaggtgaagatgtacataatgttatattgaatttattttccacaggttttatgcaagtcaataggcgtggaaacaataaagtagaaatatctaact

SEQ ID NO: 982 - DNA, 1770 bp, Aedes aegypti
atgctggaaccgataacgatccacacctacaaacccctagcctgctcagcaaacaccaacacaaccgaacgcaaccaaagctacatccatcacatcgggaagaagcccctggtctatcggaatgtcggccaacatctacaaatcgcagcggaaaagtatcccaacaatgaagcactggtatcgtgtcacgagaacaaacggctcacgttttcggatgtgctggaaaaggccgatcgtatcgcggcttccttctaccagctgggcctgaagaaaggtgatcgcgttggaatttgggctcccaacggaacgcagttctacttgtcttcgctggctgcggcacgagccggaatgatatcggttctgatcaacccggcttatcaagtacctgagattgaatatgctatcaacaaagttggggtgaaggccatcattgccaatgagagctacagatctcagcagtactacaacatgttagctcaactggcaccggaactagcccagtgtaaacctagcgagctcaaaagctctaaactgccatcgctcaggacagttgtcatcgatagtgaacagaataacaagctgccaggtgccatcgctttcaaagaactgctcaatcttccctcagagccggcaatttccaaaattgaggcactacagtcgaaaatccctcctgatagtggtgttaatatccagtttacatccggtacaacaggtcaaccgaaggcggctttcatgtcccactacgggttcgtcaacaatgcgatccacattggtcacaggaacgagtttgacctgaaagaccatcggatctgcgttcagacgccgtttttccacgtgtttggaatcgtcatcgggatcgtaggtgcaatgagttacggaacaacactggtcttgccgggacctgggtttaaggcgtccgaatcgctggagacgatcgccaaggagaaatgttcggtgatctacggaaccccaaccatgtacgttgacttggtacgagccgtgagagagagcgggatcaaactaccaccagtcgatcttgccgtaacgggaggagctgcctgttctccacagctcttcgtggacattcagaaagctctgggagttcgacaagtgaaaactgtcttcggtatgacggaagcctctgctgtgttgttccaatctctgtttaacgaatcaaaggaaaatgtccttgagacggttggtcatctaacggatcactacgaggcgaaggttgtcgatcaggatgggaatacagtgccgtttggaacgtctggagaactttgggtgagaggctacggaaccatgcttggatactggggtgatgagcagaaaaccaaagaaacaatcgacgttgacaagtggttgaagaccggtgatcaattccagctacgagaggacggttacggaaagatcgttggtcgcatgaaggagatggtgatcagaggtggagaaaacatttaccctaaggaactggaagactttctgtgcacacatccgaagattttggagacgcattgtattggtgttccagatgaacgaatgggagaagaaatttgcgcttatgtgcgacttcaggattcatccatgagtttagatcacgcagagatgaaagcattttgcaagggaaaaatcgctcacttcaaaattcccaggtatttaaggattgtcgatgacttcccgaaaaccgtgtcaggaaaaatacagaaatttaagctagtagaattattcaaatctgaatccgtccaaagtgatcagaaataaagtcacgac

SEQ ID NO: 983 - DNA, 5417 bp, Aedes aegypti
ccagtcgtcgcgcgatttgcaaaaaaaaataaaatggctttagaagaaaagaccgctcgctcggtgcacccattctgaacgtaccccacattccccaccatttcaaacgaacgcccgctagcaccgcccgtgctgtcaaaacgccagtacggtgctacccttggccacgtaatgttcgctgtcacttttcgaggagccagtagtttttccatcatctctcgcccaatccagtcgtcctccgtcgtcgcgtagatttttttgttccgtcggaaaagtggcccgaaaaatccgtcaaatcatccgaaattgtgtgttcctgatgcgccacggagtggttacaatgttccacagttgattgcctgcgtggttttggtgtacggaaattttgagcagcgattcggagcttgctagaagaagcaactctttgtgtgctttcctctgtaagcctttgcgagaaaagtgttccgcagtcgtgggttttcagttcatcgtccaacattgggaaagataacccaagtggaaccattagatgatgtcgaatccatctcagtactatggaatggcaaatggttatgctccagctacaaatggaccacaacaacagcagagccagtttccgccaacgtcacaacagcaggttatgcccccacagcagcagtattctgcaaaaaacattatgatgaacggtccatcgcagtatcccccggggatgcctggaggagcccctcaatacggtgtcccacaaacatccgtggccccggttccattgcaaaatggaccaccgatgacgcaaaagccgctatttaatactcagttgccgcagccgaataatcgagtagcgaatctagtttcgaatggcaacagtgctacctcatctaggacgtcatcacctgctctagttaacaataatattccggcgtcgcagttgccaccatcaatgaacagccgaccaggtacctatccgacgccgtctagtcacagtcaacagactactacacctccaactaataactacaccatgggttccaacaacaattggacaagtgggatccctgcaagcacgataaacacacctccaaagacagcttcaggtctttcaactccactaaatgcctccactccaacgttaggaatggcacccctcaatgggcccgtcaacaatcttacagctagtatgcaaaatttgaacgtcaatcgacctccctctgcccaacagcaaataaaccatgtaaatggctctggaactcaaaaccctccaatttctagcagcagctacactaatcaacctcaacctggtcaagtaccgccaatgaaaccgccaaatgtttcgcaaccaacaagtagtacacaagcagcatatggccagctaccaccactaactagccaacagggacgacctgtaaatggcaaccacgttcccaatttgcaaatgcctccacaaccccaacagcagaatcttcctccctcgagtagtgcaggtcaatcttacccaggcatgccgccagcaccttcggtcgtgacctcggcaacatctgcaatcggcaaaagaccgctgtatccttcgcagactatgcctccaatgcccacaccccaacaaaccaacagctactatccaaatcaacaacaacagcaacctcctatgcaaggaatgcagcaaaatcagcaattccagcaaccccatcagcatagtcatcttccacatcagcatcatcaccatcatcagcaacaacaagtccagcagcagcagcaacttcaacaaccttacggtgccaactaccaacagcaaccccagcaacaggaccaacagtacaacaacgttgtgcggagtgggttcaaccgcctatggggcaacaatacggtagatcttcttcagaatcgacacattctaccggtcgaaaaggttcgaccgcctccgatccatctgaaccatccgtttcaggaggctgtcaactgtaatccagacattttccggtgtactctgacgaaaattccagaaacgaaccaactgctgcagaaatcgagacttccactgggtgtgctgatacacccgtttagggatttgaataacctgccggtaatttcctgcaacacgatagtgcggtgccgggcgtgtcgaacctacatcaatccgttcgtgtttttcgtcgacagcaagaagtggaagtgcaatctgtgctaccgagtcaacgaattaccggaggagttccagtacgatcccgttacgaaaacgtatggagacccaacgcggcgacctgaaatcaaatctagcacgattgaattcatcgctccatcggagtacatgttgcgacctccccaaccggcaatctatctgttcctgttggatgtgtcttcgctggcacagcaaaccggttacctgcacaccatctgcagtacgctgatcgaacagctggacagtttaccgggcgatgcacggacccaggtcgggttcgtggcctacaatagtgcgatccacttctacaacattgccgagggctacaatcaaccgcacgagatcaccgttctggatgtggaagatgtgtttcttccgtacccggataacttgttggtgaacctgaaggaatgtaaggaactgattaaggacctgttgacccaattgcccaagcgattcgaacatgctcacgatagtaatagcgcgttgggagcggcacttcaagtggcgttcaaattaatgagcgcctgtggcggtcgagtcaccgtattccaatgctgtttgccgaactacggccctggagctctgcaatcgcgagaggatcccaacaatcgatcatccaaggatgtggcccatctgggcccggcaacagatttctacaagcggttagccctggattgttctgcccaacagattgctgttgatctgttcctgttaaatagtcagtactgtgatgtagcaacaatttctgggattagtaagtttagcggtgggtgcatgcatcatatcccattgtttagtacatcgaaaccgcagctggtgaaaactttgcagaaatgtttcgaacgttacctaactcgaaagattggcttcgaagctgtcatgcgagtccgctgcacgcgaggattggcaatccacacattccacggaaacttctttgtgcgatcaacagatctgctctcgttgccgaatgtgaatccagatgctggtttcggcatgcagatcacctacgaagagagcttggccgacgtcaaatcggtatgcttccaggcagctttgctgtacaccagtagcaaagcggaaaggcggattcgggtgcacacgctctgcattcccgtcacttcgagtctgtcggaggttatgtactcggccgattcccaatgcatcgtcggtttgctcgccaaaatggccgtggatcgttcgctgacctcgagcttgtctgatgccagagatgccttcatcaacgcgactgtcgacattttccaggcattcaagattgcgcagaacttgccgcaaaattccggttcgattgtggcaccggagaatctctcgctgctgcccctgtacatcttggccctgctgaaacacgctgcattccgggtaggcaccagtacccggttggatgatcgagtatttgcgatgagtgagatgaaaacgatgccactggatcagctgattcggtacatctatccggacttctaccagctggacagtctgttccaaagtgccacccaggagggagcggatggtgaaccccatttggtggaacctccgcggttacaactgtcggctgagaaattcgattcacgttcgatgttcttactggactgtggaccccacatgttcatctacgtgggatgcaatgtattgccatcaatcctgaatgaagttcttggagtgaacaacttttcggaaattccagacttctgtgtcgaactgccaagccgggagaccccagccagcgaggcactttttgcatttatcgatgccatcaacgaagagaaaccgtattcttcttacgtgcaggtcatcagggacaacagtcaattccgttcgtacttcgtggagaagtttgtcgatgacaggaatcaaagttcgctatcgtactacgagttcttgcaacacctgagaacccaagtgaagtaaaaaaaaaaataagaagatgaagatatatttagctgttttcaagttgaatgtaggcccgaacggagagatttttaataggtaagcactcacacaaacacacatacacacaacaaccacccacaaacacacactgcgtagtaaatgcatcccgagtgggacggtcggggcgacaattttatccttctgcgaaacacaggacatacctaaatatgtagcaaattatgtaatataaaatatagcgagagtaattaaaaaactagctaatcaatggttgcaagtgtaaagtgaaacaataaaaaaaaatatataataaaatatgaaacaatcgtaggtaaactaaatgcgaacaaatacactgaattcgacgactgcgaatgttttctttctacgattgtgacatacactagggttatgaaaaaaaggaagcaaatgtaatcacttgatgaaaacgctgtaagatgtatcccctaagataaaccaagattaataaattatagtttaccctttcgattgataacggcgcgtttcggtaacatttcctatcttgtcaaaatccgtagttcaagagacgaatttatgtaaaatgagattttttgaattactgtaaatcaataatgcatccaaaacacgataaaagcctttttattctcaatgatagaagcgcgtagttgttagatgtaaaaaaaaacgtttacatcattcaaggcacctaatagatatggttgatcgataagttagtttctgctcaaagcaaaaaaatcaattggttctgccaacagaaggcattttcattttaatggcattcatgtttttgtttccacaactgtaggttagctttgtaaaatatattttgctgtttatatctaggagcttctatgtattaggttgaaaagaaccattcacttattgtttacgcagtcataattgaataagagaagcatgtaaatttggatgcaattgtggaaaggctacgcggaacaaaaacgttgcgcgaacgactggtgagctatatttgcgattgcctactttagttattgtatacctttcaaaaataggttactgtatagttattttgttgatatatttcaatgtcctctttcgactaaagtatgtttgcgtttacctaatatctatgtactactggaaatggaatgtcatgttaaacgcttactgtttatttctgctgagacttttggtaatgggcagtaaacatcggagtaaacgaaaacattttggtgtatgcatgatgttgattatacataatcaaatcttatgatatgagttatcaataaatcacaaatactgtatgagcagagaaaaa

SEQ ID NO: 984 - DNA, 1710 bp, Aedes aegypti
ctcgtcgccaacgtgtttcctcgcttgctgtggtgtgtgctggaaaacggtttttacttgcgtttagtcaaattcaatctttgtggtgagatcgtttgatcctttcttagcaacactactccaaggtgtctttttgcgcgtcgagtgtgcagtcggaaggataacaggaagtttgctcaagaagtgcacagttcgacgttaacggtagaatccgtaaatcgaaaagatgtcgaggaccctcgaggaatcccccaatgcccacatcaataagaccctgctggacaagtacatgagcctgccaatgccggagggcaaaatccaggccacctatatctggatcgacggcaccggtgaaaatctgcgctgcaaggaccgaacgcttgagttcattcccgaaaaacccagcgatcttcccatctggaactacgatggaagctcatgttaccaagccgagggacacaactccgatgtctacctgcatccagtggcgatcttcaaggatcccatgcgcccgggcaacaacatcctggtcatgtgtgaaacctaccggttcgacggaactccgacccagtccaacaagcgccgtacgtgccgcgaggtgtgcgataaggtagctgaccagcagccttggttcggaatcgaacaggaatacacgttgctcgacattgacggcaggcctctgggatggcccaagaacggattccccgggccacagggcccatactactgcggtgttggtgcgaacaaggtgtacgctcgagatatcgtagatgcccactaccgagcctgtctatatgccggcatcaagatctgcggtaccaacgccgaagttatgcctgcccagtgggaataccaggtcggaccgtgtgagggcatctccattggtgacgagttgtgggtatcccgcttcctactgcatcgtattgccgaggagtttggcatcgttgccacactggatccgaaaccgatggtcggcgactggaatggtgccggtgcacataccaacgtatcaacgaagaccatgcgcgaggaaggtggcattgttgagatcgaaagtgccattgccaagctgtccaagtgtcacgagcgtcatatccgagcctacgaccctcgcgagggcaaggataacgagcgccgccttacgggaaagcacgaaaccagttcaatctacgatttcaatgccggcgtggccaatcgtggagcctcggtgcgtattccgcgtggcgtcgccgacgaaggcaagggctacttcgaagatcgccggccaagctccaactgtgatccatacagcgtcgtcgaagccatcctcagaacgatttgcctggacgagtaggactgtttcccgtcaaattgtggtattttaaaaaggtctaacaacacaaatccattcaacctaaaagagaaaccggtgcattctattgtaactaacgacaatgttttttgtttttaaaattataacaatctatttatgtttctgttacgttacgagaaatcactgaaagagagctattatattatattaatattccatctggacataagcacgacaaccagaaccgatattggcagggagggcatagtgaagcctcttgcataaagtagatcatctagtgaagataaaagtgtttctcgtataataaatgttattaaagtattgaaaaagtaagagtttgtgttaaagcattgaaagaaagtaaaatccataagaat

SEQ ID NO: 985 - DNA, 2607 bp, Aedes aegypti
ttctttttttcaacaggattaccggaccctttcgcaaaaattcgcgtcgatggcactgcacaagagtacaaaacggaaatatgcaaagcatcgctggagcccaagtggaatacccattacgatctgtacctgggcaagaacgacaacattacgatatccatctggaaccagcgcaaggtgcagaagcgccagggttccggcttcctgggatgcgtccggatcgtatctagcacaatccagcggctcaaagatacaggatatcaacggctagagttatgcaaagcctcgcatgatgatccggatccagttaaaggacaaatcatcgtatctctcatgtcccgggacggtaccactggcggtactccgttggcaatcgttggcccagctggcgatgtacggggcccagacgacgacgaagagattttgaaggatgaactacccgctggttgggaggagcgtctaactcagaataatcgtgtgtattacgtgaaccacgtcaccaaaaccacacaatgggaccgaccaacggaaccggccggttcccttccgccagctttaagtaacggaagcagtaataatagtagcgccgactcgataccacccggtccgtcgaaatcggccacaaataatagtatcaatactcggatacgtgatgacagcatgctgataacgcctagctccagtactagcccgctaagcgaggtcaatagcccagtgacatcgaaacaaacgactgagttgtccgcgacgcggaatcaaggaatgttgtcgggcttgccaaatgcaattggttcactatcgcttgatccgtccgccgcacgttcacctcaatcgaatggcattatcccaaatgcacacagcacaccgacttctaacagcagtaatagtaataatactagcagtaacaacagcaatattgcaaacgtttctgcaggtgggggaggtaatttttcagtgtttaacaattccaaaatgcgtactacccaacaaggacaagtatatttctatcatattccaaccaaaatgtccacatggcacgatccacggataccgcgagacttcgatacacaaaacatcgcaccggaaaccttgggtcccctgccgcacggttgggaacaacgaaagaccgcatcaggtcgggtgtatttcgtagatcacaacaatcgaactacccagttcacggatcctcgcctaaatggacatatcctacaaatcatccggaaacaagcacaacctcctgtcagccagagttcttccagcggatctgcagcgagcgggtgctcttcgacgaatccggttgcagcaactgccctcagctctctgtccggtgctggtccacaggtttcaaacaacggagttttgacggctgttgccggaagttctcggctaatgatgccaccggaagcgaccgcttccggcagtaatggactgcctgtggtatgtattggctatcaacgtgttgcagaatcaataaaaaatggaacactggaagcaccaaaattactcattttttactgttttaaccgtataaaattgaaatatttcaggaacctacaccgcaccgagtaccacctaacaacattcccgatctgccgcaagggttgctggatgtatcgacgagacctggtcggaaagatacgatcattgcgcgtcgagctgcaagccctacagccccagtctggccactgccggctggaggtgtctcgacaggaaatctttgaggagagctacaggtatgctagttgttcatttaaaacacattattcatctatattttacataatggattttggctacaacttactaattcaatatcaactattgcaaaatatagaagtaccaagcgacctgacaaaacatgagtaccaattatctaccttagaaaacaatatcaacggggtgatagactcgacgttcagtgtggaaaacaatagctttggagcgctgaaggtacacgaactgaaacagaatggtgcttcggtgcaggtgacggaggataacaaacgggaatacgtaaagctttatgtgaactatcgatttatgcgagggatcgaacagcagtttttagcactgtcgaaaggatttggtgaattgataccgagccaacttttgcgacccttcgaggaacgggaactggaactggtgattggtggtatcagcaagattgacgtgaacgattggaagacgcacacacggctgaagcagtgcactccggagacgccgcagatcatatggttttggcagctgctggtaaatcgaaatagttcttcagaactagctgatatattatgtgtaatgaatattatcatttttatgttccagattgtggaatcttactccccggagatgcgcgctcagttgctgcagtttgtcactggttcgtgccgggtaccgttgcaaggtttccgtgctctgcagggttcaaccggagccgtagggccccgactcttcaccattcatctgacagcggacgctccgattcaaaacctaccaaaagcgcacacctgtttcaatcggatagatctcccaatgtacgattcgtaccagctgatgtacgataaattgacgcaggccgtcgaagagacatgtggatttgccgttgaataa

SEQ ID NO: 986 - DNA, 6372 bp, Aedes aegypti
gtcaaagtccgcctttttcgtcttgcttttttccccgaccgcgacaacgaagtcttgcacttttccactgttcgtcgtccgaaaaacattgtgcgtgaaaaatagtcaggaaaatctttcttttttattagtttttcccagtcatttcctcgcgtagtgatcccgataaacggaagcaatcgacgcttttgtgagtcctcgtattgtggtggtgtaaaagttgtggaaacccgcattccgagtgttgattctcgattggaccctaaaattttcaccgtccacacgaaagcaaggcaaggaaccccattctggagcactactttttgatactacaggtagcaggtacgggaatctcgtttcacggcggatggaacatgctgaaatcagaagcctgattcgtggttcgagtggaatcgagtaaatcagaatctatccggcgtcttaattttcaaaggttttcctaaaggactcgaagctgagtgaactaaattaactattggacagtgaagaaaagaaactactgtttgaacccacgagagttattgaggagattaaactgaggagctgtagcagttggataaatcccaaaagtaattccacacgatggaggaatcatacctaaatgatttggaaacggcggcgcacatcataatggcccctcctacggtggtcaccaaagagcaacgccaacaatcggaaaatatctttatgaacttccgcaaaaccaaatccccgtacgtcctgtgccagacgatcttggagaaatccgtcgtcgatttagtgctgtttgaggctgccgacgttcttaaaaaagctatcattgccgaatggaagtacattccggaccaggacaaagcatctctccgacagtacttgctgaactacatcatccagcgggacattccagttttcatccgggacaagctgctgcaggtggtggcaatcatgattaaacgggctagcttggaggacgttggcgccgaaagagcacagattattgaagagacgaagaaaatgctcacttccggtgacgtaaaacagcaaatccttagctgcagtatcataatggctattttggaagaatactgcaatatcgtccggtcggacgacaccggtcttaccacctacgagcatttccgcgcaaagaagcaatttgaagattcagaactgcttaaggtttttgtcatgacacttcaatcgatggaggaactaatcaaaatgtatgacgccggtaattcaatgcattcgtatctgttcaagcagatgttgtcggttatggaaaccattctgacatggggtttcttgcttcctaaattacaagtgattcgtgtgctacaaccatcgctgtccaagaaaatcatcgatacctcggaaacggtgacgaaagcattgcacgctcctccactacgattacacgcccagtggaaaaacattatttttgagcctaaactgttggagatcttcttctacatatactggaagacaagagataacgaggagctgcaaccgaaagctttgatatgcattcttcagttgtccactctgaagggtcccatcatcaccgagaacaaggacgaaagtatgacctatctggtcaattatctaacgcatttcctttccatgctttctacgatcgaaatcaaagagaaagaagcatacagtttttcacttatattgagaaaattgcttcagcttctaccacgagcagagatcaaaggacttccgaacagcctgttcgaagcttacatgcaacaaaacttgacattaacgctaaaatttattgaactctccgcgatggaggaagccatgaccccggatgaaacagtgtacatcgacgctttgggcaacctgctagagatttggctacacattctcaacgacaaggaaaactatccgatcgaagctatggtacccttcatcacgcaaatgtttgaaaagtacattcagtatcacctcgctgcaccagacggaatgcgaggcgttggtcgagatggagattcaatcgacgaaattgccgagtttgaggaatccgatcgggagcgtttcaaagagcaactgatcatcatcggatactttggacgcgaaattttatcacattcattaccattgctctcgaaattgttggaggatcgaactcgaagtttgggaacccagcttcatatgcttcattcgactaaaacaatggacgcatgcagttcgaaaactttggtaaatctttttgaggacatccactggattttgttgattactggtcacgtattggcattggaagcggatggagaatcggcaatgataccgacggagattctgcaattctgtaatcagtgcgttgccaacaatgtaacggatgtgaacaatagcttaaagctgttggcttctcccaatcaagacattcaagagattccaaacgccgaggtcaatgcagatccggtgatccgattgatcgctgctggtttccgactgtgcgagctggagaagagtgccatcgaagtacggatgtatcatttccttagtcccgagttgagtactacattagtatggttcctgcggcgatggtccgatgcgtatctgatgccgctcaatgaagatacggtcagtgcaacgttcaaacaagcattcggagctggatctcaaggttcggtttgggtaataaattatctcctgaacaaaatctgcctaaatgctcagtatcttcgagcggaacaatccgtcattgaggaaacatgtgatctgtttttggtactgcttagccggaagccacgctgccaagctatttttggctcggaattcttccgatcaatttgtgatctgaaaagtgtagacctgccggtatcgatcaaacgaaaactgttgaaaggtttcgtaatggttggagccagcgtggagaacgaagagctacgagcagattacttggggaaaatccttcaacccatcgaagacaagtacaaaatgttgatctcacatcaaaatttccaatccgtctaccagaatgaggatgttaaactgaaggtgatcgaaatcctggaagagctgatcgggtgcgtacagggcgcctactctaactcgttgacgatcatttttaccaaaattcaaggcatttgcaaagagattcctactttcttgaatttgtaccataattatacgattattgtcgagctgattttggagctagtttgtgagatcgtgtccaacattgccaacgtatcctcggaaaaagccatcaggacggccatcttggagtgctgcttctcggtgatccgaatctacgtgaaaaacaattccaaccgtgtatcgttggataccgccaaccaggatagtgatccggtggatctgattcttattcttaaattgatcaaccacctaacgtcgaaattgctcttcacggatgactttgccggttcggatgaaaccaatgctcagtcgtcggagatttgtatttttggtatcacgcacatcgtaccactgatcacgatcgatctcatcaagtatccagatctctgtatgcaatactacagcacgatcacatcgttcatcgaggagaagtcacatattattcccacgttgcatcccgacttgctgaaacagctgctgggatcgatcgagctgggcctaagttccttcacttcggaaatcgagtgcaagtgtttggaattcctggaaatctacgccaacagtgtgtacttcaaccaggatcctcaggcaccgatggctcaactgctgcttccgttcctcaagctgatgctagacatgatcttcggccaaaagattgatttgaacaacacaatggactggtaccggacggtgtttgtggtgatctgttgtttcccggagcattacaaggaattgttgcacaacttcctcagcgagcagtttgactcggaggcaagtatgggcaaggatctggttgaaagtatggccacggtaagtaatattgagttcgttaacaatcggttaacaaagtccaagtttatcgataaatttgacaaatttgtcgtgctggttagtacaatggtgaagaaataaactggttttattttactatttggttacgagaaattgaataaggaaaaagaatattgcttttttttgaaacagtaaatatgactatctctttttgtgtttctctaaaagtgataatgtacgctagaaaagaaatctgttgttctaacatttatatttcaatgcttgaaaggtaagcataaaagatcgaagagcacaaatgaagtgattgacctaccagaaacaaatggtaacaccaaaagtccggtcgatgggtatcgaatgattgtacttgtagattatataggaaactttaactatgtattacatttgccatgtactgaaggcagttttgtgtcttcgtgttatgttattctgcgtttactttttgtgatcgtctttttaaatgtattgctattttgagaaactttttttttatgggaatcgtcgaatgttttgtgtagtacgatggaggatagcgatcgatcttgtaaatctgtatgtaggtaggaatgtgtacttagataggggcatgaacataacagccatttattcctctttgtgcgaatttcggtccaatcgtttttgtttcatcttttatcgttatcatctttaaatatttcgactttaagtagagaactgtacagtttttcaaataattccatggcctttctcttgttgatagacatgatcttactcttactgactgtcctatagtctgtcgaaatgaaaaaaaaaatcactttactctggagcactgtgcaaagcttatggcatacaacacaatcacttaacagttgtaggtttacttttttttcctttcaaatttaagaaagccctctcgaagaaacggaaactctcacgtggtacgattaggtaacaaaccatacattgtcataaaaaaatattatcgggaaacgatctgagggaggttggattaggaaacaatgttttgaggtcgaattttacacgcactttttgcataactttttagtaacagtatcaaagtagtgaatcaaaatgaagtaaaaactatatatttatacaaaagatgtaatgtaatgacgacattaaaatagttttttgaatggatgagtaacttaacgatctgtaacgtttcggaatgaacgtccgatgtggagttatttcatgtaacgaaattggtatgaactttgtaaacgactttcgattatttattcactttattatacgcttcgctgttgaagagaaatcggtcagacactagagtatattttaccgtataattattataattaagcgttacattttataaataggatcagatttttaccatcgttatgtgaacaaagactaaacttcttataccgttacattcatgtgtgcattcattgtgcagcgattttgtggtgtcatcaaaatattacattcatcagtttttatttcgtgtgtagttcattagaaaacgtaaaccagaacattttctatattttgaaaccttgtgaaccttttagaagccattacttagaaagtttttgcgaaagtacattggaaatcatctttttcgtgtaaataacgtttttgtcggtcataaagtacgtgttctgttgtactatatatttataagccaagcatctttcctcggaagtgaaaccatttatctaaaacccaatagagattatcgaaataaaattggaaaaagtatatttctcctttctagttaatagctacaacacccagaagacagcccagtttacttctggagtttgaacaaattgttgaaattttactggcactcttttgaaaacaatcaaacattagaacacacaagcatgaatacccaaaacccaatctctctttcgtagaatagatggtaagttttaaacaaagtcatgaacagatatacgcgcatgtgtacaacaaatacaaatacacctatccacaaagcaaaagaacagcgttagagaaatgcgttcattcgtatcaatatcaattcccaaccggaaacagcaatcctgttcggtgctcaagccgaagacattgaaaactaagactcgagatcagaaaaaaagcattttgcgcactcgaatcgcacgtaaccgcgcaaaccacgcatggcagcagttaccgtgccgccgttagctcagtgctggatacgtgtgaatcgatgtaacttattactttctaaaagtacaaaataaccagtcacatggagcgatatacttgaagcaaactagacacccaaaagtaaagaaacattttgggagagtgaatcacggatattagctaagcgattttaaatttatctttccgaaaagtgatactgacgtaaaatgaaacaaataaaaagaaaacttggatccaggtattattcctgcgtaaatgaataaaaaa

SEQ ID NO: 987 - DNA, 1795 bp, Aedes aegypti
aatccttacgtaattaatggacgaacccttgagaagttctcgcaattctctagaggtccgtgaaccaccaattgggaatcactgacttaaaggcttataaattcttacaagtgtttctcgtacgaaggcaatcaccgctcattgaacagtccgcatgtatctatttcttcatctgtagatgtagcggtcttatatccagtaaaagccaccttgttgtctacccaaattaaattgattaaattgaatttgtgttttgtgagctcaacgatagagcttttagtttagtttgctatcacccaacacgtgtagcatagcctcatctgtagttttgataaacgtttgaaatcgaacaatttctcatttatcttgcagttcgaacgaaatggccaaactaatcgatgggaaacaaatcgctgccgacatccgcatggaactgcgcgaacagattgaggaatggatgaagcaaggtggtaatcgtgctccgcacttgactgccattctgattggggaggatcccgctagtaacacttatgtttcgaacaaaatgaaggccgcagccgatgtcggcatcactagcaaaaccgaacgctactcggcggacattaccgaagagcagctgttgaagcgtatcgaagagctgaaccaggacgactccgtggacggaattctggtgcagcttcccgtgccgggtcacatcaacgagcgcaaggtgtgcaattcggtgtcctgcgacaaggatgtggacggtttcaacgaacggaacattggccggctgtgcctggatatgaacacactgattccgtgtaccccgttgggcgttcaggaactgatcaagcgcaccgaaattgaaactttcggaaaaaacgcggtggtggtcggacgttccaagaacgtcggtatgccaatcgccatgctgttgcatgccgacggtcggaacgatacctgcgccatggatgccaccgttaccatgtgccacaggtttacgcccccggaggaactggcacggttctgccggacggcggacatcatcgtcacggcaacgggagtacctggcctcatcaaggccgatatggtcaaagaaggggcagcgataattgatgtgggaattacccgggtgaaggatcccgaaaccggcaaaaacaaattggtgggcgacgtggactttgacgaggttcgcaaagtggctggccacattacgccagtgccgggtggtgtcgggccgatgacggttgccatgctgatgaagaacaccttcatcgcggcaaaaaatttggcacacaaaagggctgacaaggaaaagtgagatagtaatagcaggacaatataagtgatgctgcgatgggaacgggagaagcgaatcttataaaaatgtgtttataaggaagtatttcagagagttttcaattatgtttaattgcattaatcattaacttgtaggcttagaggatatgcttagtaatactaagaagcatttatttatgtacgcaaaaacaacgttcggttgcaaaatatagcacaatagactttatggcaatgttattttccgttattgtgatactatgatgacattctattgcatgattactaaaactgccaccaaattgcactagtaatcttaaaattcctcaataaatgttccgattgaatgtacatttgaatgaaaaaaaaaactgtttttcaagattgctaatgattgaattatggattcttgagactcgaagcaaattcttgaataatacgtacaattatccttgaaggtgccataatgattggggaaatctaaacaaaatgtcca

SEQ ID NO: 988 - DNA, 2026 bp, Aedes aegypti
attttgttccacactattgccttctatacccttacattacaatcaacgcaccaatcttaacaagcacatcagatgcacgaaagaacgtattagtgcaacttcggtagcatcgtgtatgtgaataatttatagttggtctagtagtgaataatcaacaaagcagatcgcctcccataggctgttgaaaacttttatcagcattagtgggtcggaagtagaagtttgtatcagaatcagaacaaatcctgaatgacacactttcgttatcaattttggtgaacaacagatgattgactatcatcataatagtagcggttctacgactggatggtgtgtatatcagagccaacaatgaccttcttataaatataaaagtaaatgcaaaatcagtcctcgtcgtcagttcagcagtgaacttgcttattctacatcaattttatgtattgtgttccgtgttcgtgctcagtgttgtgtgcagtcatcatttggaagtgcactcagatattcgcatcaaaatacaaattgatgatcatatcagtaaaatcgatcaatatctaggcacttcagccaatagctatcagatataacggtttagagtgatatttgaatccttaagtgatttgtgatattatagaagaataatggcctctgagcgtagattaacccaattccgaaactgtcgcttattgagaaatcatcaattggtgcgagatgatctgtgggttcgtgatggtaaaataattgatcccgagaaggtgtttttcgacgaaaaacgacaggctcatgttcagattgattgtaaaggagcaatcttggcgccaggattcatagacttacaaatcaatggaggatatggagttgatttttcctatgacattgcaaccgtcgagcagggaattgccaaagtatccaaagggcttcttacgcatggggtcacttcctattgtccaacattggtcacatctccacctgagacgtatcacacggtgctgccaaagatatccaaaaaaacaggtggtcaccacggtgcaactatcttgggatgtcacgtagaaggcccatttataaacagtagcaaaaagggagctcatccacaagaatgcatcaaggaattcgatcagggcttccaaacgctactagacgtgtatggatcacttgacaacgtgtgcatcgttactcttgctccggagaaggaaggtgcatcggaagtgattcgtgagcttagcaatcgtggtatcactgtatcagtcggccactcgatggctaaccttcatgatggtgaagtcgcagtgcagcatggtgcaaagcttataacgcatctgttcaacgctatgctaccgttccatcatcgcgatcctggattggtaggtttgctgactacggacaatatcccagcagataacctggtctactttggcattatctctgacggagtgcacactcatcctgctgcgctcagaattgcttacaagactcatcccgatggactcattttggttacggatgccatttcggccatgggcttaactgagggtagacatagaatcggacagatggatattgaggtgcgccgtggtcgagcttatgtcgctaatactgatactctatgcggaagcatcgcaccgatggatgaatgcatacagtttttcaaaaaagcttcaaactgctcaattgaatacgctttagaggctgcatcattacatcctgccaaatgtttaggcattgaagaccagaagggcacgcttaaatatggagctgatgcagatttcgttattttggatgattcattgaatgtactgtccacatggattgccggagattgcgtttatgagaacgagtctttgttatccccaaaacttgatgctacttatagaacgaataacatcgtataaaattattagaatgttaggttgttgtagaccaatgacaatttgccgtataatctaagtcaaccattccgaagttaatattattagcgcaacaaaaaaaaacaatttcagttgaaataaatttgaatcgtttttac

SEQ ID NO: 989 - DNA, 924 bp, Aedes aegypti; identical to SEQ ID NO: 507

SEQ ID NO: 990 - DNA, 970 bp, Aedes aegypti
atggtgctggtgctgaatggcgtcctgcaggatgagtgtcccatggatacgcactcgctcttcgtacaacatccggtttaccgggaaacggctacacagttcctgtccattccgacgaaaacggttggtgctcccggattgctgtacgtgtgtcaacgagagatggccgccgtggctccacacgacaaaaatgtaaatatcataggatcggacgatgccactacgtgcgtcattgtggtggtgcggcattcaggttccggagcggtagcgcttgctcacctcgatggcaacggtaccgacgaagctgtttcaacgatggttgcccgcgtccaggaacttgccttcggctatccagagggccgaatcgaactacagctgataggtggcttcaaagattcccaaggatacgcggaggatctgtttagcaacatcatgcaatcgttccacaagcacccactggagatcgatttgacgcaggcctgcgtcggcgagttgaacaccatcctccggggggatctcaactggccaatcatctacgggatcggagtgaacgtcaaaaccggagaaatattcccggccacattcccagacaaggggcccgatcttcagctgcgcatggcacgacacttcactgggggccatcaggtgctcgacatctacgactcaacggtcggaatgctccgaatcggcccgttcaactacgatccactgcgcggggtggacctttggctgtcgcagagcgacgagttcatccttcaacatctatccactagtcccgaagttgaaccaccccactttgctatgcaagtccgtgccacacttagatacatccaggacaaccaattcccggcggtcacggtgttccggaataacaacccgcactactttaggcgagacgaaacgaccggctgctgggcaccggtgcgcttctagtagatccaatcgagacaccttgtttcctacgtagtta

SEQ ID NO: 991 - DNA, 4325 bp, Aedes aegypti
ccagctttaccaattctgaagttctgggtaaaacttcagattaatttttggtcggctattcagcgcaaacatttgtggaacagtttgaatttatgtcgtcaaacaatattgtatattactgagccatctctagtcgggaaacgttcctcgagatgatatctgatgcctgattaaaatttttgatcacatcgctgatttgcggcaccgtcacaatgtgtaccctatcgttagaacgtttacaaattacgaaccaatggaaccgactcgttcgccagaaatgttacttttgaacagaagctctcacagttagagttccagttgtctatctggtcactcacttctgttcggctacctaatacctgtaaggcccgaacgccatatcctcgtcgcaagttcgtcaggggtagatattcgctccgtcttatcttgtcagcaccgttatcaccgtgttgtggtgggagcttatcagcgataaggcagtatacctcagtttatcgaacgggaacgggactctgatggagttttcctgacgacgaagtcgctggtttagttagcacacatcgatcgggcagcgccaaacgcgaactgcgaacggatagtcttgtgattgtgcaatgtgaattagggattgctgtaaggtagtcattgacgaagaatttttgcgttcattttccgtggtatgcaacgacaccagtctcgaagaaataggatgttgcggaacgacgaagataccagtttgattcggatcaaagtggtggccgctcactcgctgaccaagaaggacatcttcggcaacagtgatccgtacgtgaaggtggacgtcaatacgatagtcggcgatgtcaacattgattctatggtcaccaagaccaaaaggaagacactgaatccgacgtggaacgaagaattcatcttccgagtgaagccaaacgagcacaagctggtctttcaggtgtacgacgaaaaccgactaacgcgcgatggcttcctgggcatggtcgagctaacgttgattaaccttccccgggagcaggaaggtcgggccattgctaccaaaaactatccgcttcggccgaagaagatcaccggcatgctgcggtcgaagattcgcggttcgttggacatctaccatgcggtgatgcgcgatcaagacggtgccgatcagaacgcatggtccctggccgatcaaccttccccggcagcggcgacatcgtccaacggggatgcgttgccaccgggctgggaggagaggcaggacgcgattgggcgcacctactacgtgaatcacattgcccggacgacgcagtgggaacgaccaacggcagtgcccacgcagcacggtaacaacgaatcggcggcggcattccagcgtagatttcacatcagtaacgatcccagcgacagctcgggtgccgggggcggcagtgccaacaatagcaacttgaatgtttccaatcgattatccgcaaagttcgcgtggcgtagtgctcgtggtatctccagcatttccacttcggagtccaggatctctactgctggtggatggccgagttctgcatacagctgtcgatcgaatactcgaatgacggaatcgattgccttcgaccaaccatcgttgccaattcgaactatggaaaatggtctatccccgtcgccatcgtcctcgtcgctatcgagcggtagtagaccaatccgacctgccccattgccaccgacagcaggcgataccccgaccagtggcagacgtctagctccacagcctccagtacctgcacccagaagttcgctggaaaacggacgacactcgccggaagacaacaatgccagcgacagggtcaacaacaacagcaatgatagcagctcgttacttaacgataccggaggcagcagtagggagtgctttgatttcttttctcttaacaatcacaaaccatcaaaaaatcaggttcaaattttacctcctctactgtttttacagacaactgacggaccctcgagtctatccggtccaacagctcccgccgggcaacccccgctgcccagttcggaaggcctgccacctggttggaccatgcagtatgcagctaacgggcgattgttcttcatcgatcacatcaacaagaaaacctcttgggtggatccacggaccggggtggcaagcattataccaaacgcggcggccaacggtggcggccaagcgggtggcgcggcgggcgctggtggggccaatgctaacgcacggcacctggacgacgaactgggaccgctgcccgagggatgggaggaacgggtacacaacgacggacgcactttcttcatcgatcacaatacccgaacgacccagtgggacgatccgcggttgtccaatccaaagattgccggccaggcggtgccttactcgagagactacaagcagaagtacgagtacctcaagagccagctgaagaaaccggccaacgtaccgaacaaaatcgacatcaaggtgcggcgggcatccattctggaggattcctaccgaataatcaactcggtgaccaaggtggaactgctcaaaaccaaactgtgggtggaattcgaaagcgaggccggcctcgactacggtggacttgcccgggagtggttttatctgctgtcgaaggagatgttcaatccctactacgggctgttcgagtactcggccatggacaactacacgctgcagatcaacccgtacagcgggttgtgcaacgaggagcatttgaactatttcaaattcattggacgaatagcgggcatggccgtgtatcatgggaaactgctggatgcgttcttcattcgaccgttctacaaaatgatgctgcagaagcaaattgatctgaaagatatggagtccgtcgatacggagtattacaattctttgctgtacattaaggaaaacgacccgtcggagctgatgttgacgttcagcgtcgacgaggagagttttggtaccactagtcagcgggatctgaagccaaatggggccaacatcgaggtcaccaacgataacaaggacgagtacattaaactagtgatcgactggaggttcgtggccagggtgaagagccagatgcatgcatttttggagggattcggatcgttggtgccactgcatttgctgaagatcttcgatgagaacgaactggaactgctgatgtgtggtatccagagcatcgatgtgagtgactggaagaagaatacgctctacaagggcgattactatgcgaatcacgtggtggtgcagtggttctggcgagcggttctgtcgttcaacaacgagatgcgatcccggctgttgcagttcgtgacgggaacttcgagggtgccgatgaatggctttaaggaactgtacggctccaatggtccacagatgttcactattgagaagtggggtacgaccgacaatttcccgcgggcccatacttgcttcaaccgattggacctcccgccttacgagagttactcgcatctgaaagacaagctggtaaaagccatcgagggtagtcaaggtttcgccggagtagactagagtctgaatcctgaattcacgccactgattacaatactacattcccccgcaaaaacagtagtcgaacgcaagcaagcaagcacacacaatttgcaacactagaagcgaattttctcgggaagagaaacgagtcgttcttaaattatatctagttgttaacgattatgtacagaagcgcgagcagatatgaagtgcaagcactctcgattaggacaagggaaacaatttttcagcgtaaggaaatgctacaggaagtctgccataatatgtaaccgaccgataatgcgagtctcctcgttccaatgattcacaaacacatacacgaacacttacaattaaacacacgcactaggaagttattcccacactcaagttttactaggaatgttttaaaaggaatttaaatccggctatagaaccacggagagcaggagagagtgagtgccttgccgctatcgagataagacgaaagtttatgcgaagcaaaatgcaaaatttttaactcattggcacaagaaaggtatagaaagtggggcacatatttacaatgaaattggcgttgtccagtgaagggattacatttggcgggattagttttttttttgtttcgcagagggtatgcgcacaagggaagtgattatttagagctggtcaaccgacgatagttcaatgaattatattgttgaaatcggaatgatgtatgtatgtatgtatgattatttaatttatagtgaacataactatcaagattgagattattatatttgataaaaattcg

SEQ ID NO: 992 - DNA, 3082 bp, Aedes aegypti; identical to SEQ ID NO: 116

SEQ ID NO: 993 - DNA, 2737 bp, Aedes aegypti
tgtccgggtggtagtcggtcgtcgcggattgatagtgttttgctctcgtatccatccataaaaagtgagaagacctacaaaatctcccagcagctgcccaaacttgcacggttttgggaaacgggaaaaagaagttcaaccagtaccgaagtaacaatccctccagtttttgtgccggtcggattccgctgatttgtgaaggtcgccgaagaagaacgagaaaagccagcaatgctgcgaaccatcgccgtaaggaatgagaagctcctgctccagggatcccgcaaagttctccggggaactgccagcagggcgctaagctgcgaagccgcccggaagtgcactgtccaaaaaaactctcaaaaatggacttcaacgggatcccaaatggcctcgctatggcaggtgaacttcgtccgtggttactgcagtaactatccagcccacaataaggtccttctgccagcgctttcacccacaatggaactcggtaccatcgtcagctgggagaagaaggaaggcgacaagctgaacgaaggtgatctcttggccgaaatcgaaaccgataaggccaccatgggattcgaaactcccgaagaaggttacctggccaaaattttagtgccagccggtcagaaggacgttcccattggtaagctggtgtgcatcattgtcgagaacgaagcggacgtcgctgccttcaaggactacaaagacactggtgctccagcagccaagcctgctgcccctgctccaccagcagctgcagctgcacctccggtaccaactcccccaccggttgcggctgcaccgccaccaatggcagctgcccccgcaccgatgaccgccgttgaacagcgtggaccccgggtctacgctagtcctatggccaagaaacttgctgaacagcagcgactacgattggaaggccgaggatccggtctttatggctcactaacgtctaaggatcttgcaggtctgcaggcggctggtgcaccagaagcccgtgctgcagcggcaggagcacccagcgttccggccggggcagcctacgttgatattccggtgtcgaacattcgtggagtgatcgccaagcgattgcttgaatcgaagaccaccattccacactactacctcacggtggacgttaacatggacaaaatcaacaagctgcgatccaagttcaacaaacagctggagaatgatggcgtgaaattgtcgatcaacgatttcatcatcaaagcagctgccttggcttgcaaaaaggttcctgaggcgaactccgcatggatggacactgttatcagacagttcgacgccgtggatgtttcggtggcagtttctacagatcgtggtctcattacgcctatcgtgttcagtgccgatcgtaagggactgtccgatatttctaaggatgtcaagaacctggcggctaaggcgcgggacggtaaattgcaacctcaggaattccagggtggtaccttcagcgtatccaatctcggcatgttcggcgtgacgcacttctgcgccattatcaaccctccgcagagctgtattctggcggttggtggcacccagaaacggatcgtacctgataaggattcggaacaaggctggaaagagagtgactacgtagcggtaactctgagctgtgatcatcgcacggtggacggcgctgtcggtgctcgctggttgcagcatttccgtcagttcctagaagatccccattcaatgctgctgtaaaggcgtactaagcttgaaaattgaatgagtatccatgccttatttgaaacccaaaaaagaacaaccaacccgctccatcaccatcagggctaccaggtctccgggaaaaatgttttcacaactaccaccacactcacctgcagaaataagtagaatattgtacagttatccatagacaagcgccgttatccccatcacatttttgcttcaagtggtactggagcagccatcgtccatggcgagaaacatccctctcgttacgatatgctccggacactttgaacaactgtctgccaataaactatttagtgaaacagtcatattagtagttacgacacactcgtacaaataagaaaccttgttaagtgtaacgaaaagtaaaacaaaaaaatcaatgaggcaaagtgatcatcaatccgtacgaagaatctgtgaaaacgtggaaccgatttgttttgagaaaaagtaaaattatcactgtccgagcggttctcacctttatctgcaagcaaagctactgctttctagttcagttagtaagactaaaatttatatttattggtttcaactgcgaattgatcgcgattgattggtttatgttgaacaaagtttgattttaacttcaatcgtgtagctagtatacaaaaaaatcaaggaacttcatagaacattttcaaaattttattcatgtcaatcgaaattacatcttgaggttagtcaaatgcccacacgaatcataacttccgaaccttcaattgcaacgatcgaaacagagaaaaactgactccagggagcatcataggtactacacacaatggatcgtgtttaaacgaatattagtggctattttaaagttgatattttcatagggacaaccttgcaccagtctaaagacatcgttttgaaccatacagcaggagatgaaattaatgttagaaagaatcgattcgtcgtacaatataacgttggtatttcacagcgtgtaagcaacccg

SEQ ID NO: 994 - DNA, 3067 bp, Aedes aegypti
cagtcatgtccggagatcaagaaagatatgctgaacgtccatctggtaccacacacccatgacgacgtcggctggctgaaaaccgttgatcagtactactacggaagtcgtaccctggtccagaaggcgggcgtgcagtacatcctggattcagtgatagaatcgctgctcaaggatccctcgaggagatttatctacgtggaatcagcattcttcttcaagtggtggaaagagcagacgccggaattgcaggacaaggttcgagatctggtgaatgagggacgattggagttcattggaggagcttggagcatgaacgatgaggctacgactcactatcagagcatcatcgatcagttcacatgggggttgaggttgctgaacgacacctttggggagtgtggacgacctcggattggatggcagatagatccgttcgggcattcgcgggaacaggcttcgattttcgcacagatgggttttgatgggtatttctttggaaggttggattatgaggataagagggaacggttatctatgaagaatccggaaatgatttggaaatcgagtgccaacttagaggactctgacatgtttacgggagttttgtacaacgtttatcaacctcctcctggattctgcttcgatatactttgctcggatgaaccatttatcgacaatccatacagcgctgagaataacgtggaaagtaaggttgaccagttcataatcactgttaagaacatgagttcgtcttaccgcactaacaacattgcacttacgatgggtgaagactttcactatcagtatgctgaaatgtggttcaagaaccaagataagcttataaaatacaccaacgccaaacaggccaacggttccaatgtgaacgtcttctactccacgccatcctgctacctgaaatccttgcacgacgcggacataacttggccaaccaagagcgacgacttcttcccgtacgcttccgatccgcatgccttttggaccggttacttcacttcacgtcccacgatcaagcgtttcgaacgagttggcaatcatttcctgcaagtctgcaaacagctaaccgcgttaactcccaacaaagagaatcatttcactccacatctcaatgtgctgcgagaagctatgggtgtcatgcaacatcacgatgccgttaccggcaccgaaaaacaacacgtggccaatgactactcccgaatgctacacagagcgatcgaagcttgtggagcgaacactcagggtttggccaaaaagttctcccatggaatcactcgggatttcactttcgagttcgagacctgccatctgttgaacatcagcaaatgtgaaatgacggagtctaaggacaacttcatggtcactttgtacaatccactcgcccattctggctatcagtacgttagattaccggtttccggcaaaaaatacatcgttaaggattatcgtggcgttgaaacaccttcgcagatggttccaattgctgaatccgttctggacctaaactatcgctttagcaacgcaagctacgagttggtcttccttgccaacgagctacctccgctcgggtacaagtcctactacgtttcgcgtatcatcgaaaccaatccttctaatcctacggcgcaacttcagtcggatcaaccccacaaacagtggcactcggaagaagtcactattggaaacaagtacttgaatgtcagtttcgataccaacggtttcctaagtaccataacgttgaacggagttgcgcatcgactgcggcagacattcgtctactacgaagctgccatgggaaacaatgtagccttcagaaatcgttcatccggagcgtacatcttccgccccaatggaaccgatagcgcgataaccgatagtgtccagctcaaggtattccgtggcaatgtcgttcaagaggttcaccaggtgttcaacgagtgggttagtcaggtggttcgagtctacgccgatgagaaccacgtcgaattcgaatggatggtgggacccattcccattgaggatcgagtcggtaaggagatcgtgtccagattctacacggctgctcaatcgaatggagtgttctggacggattccaatggtcgcgagatgatcaaacggaagagaaaccatcgtgacacctgggatttgcacttagaagaaacaattgctggaaactactatccggtaacggcaaaaatcgctttggaagacgaaaacatacggttggctgtgttgaacgatcgtgctcagggtggatcaagcttggaggatggagcgttggagttgatggttcacaggaggctgctacatgatgatgcgttcggagtggaggaagcattagacgaacgcgcattcggccggggacttgtagctcgtggtaagcactacgtagtgtttggaccgaagaagacaagcagccccactttgcaagcgaaggaacgcttcctgcagaaccacgttctactgcccaactgggttttcttgagtgacgtttctaagttcagttatgaggaatggcagaagcgtttcaacaatatctactcggccctttcgctctcccttccactcaacgtcaacctgatgacgttcgaaccgtggaaggacaacagccttctggtgcgcttcgagcatctactggaaaaagacgaggacccaatgtactccaagccggttaggttcaacctgcaggacatcttccgctcgttcagcatcgaagaaatccgtgaaactacccttgctggcaaccagtggaaagaggacaacaaacgcttccaattcaaggcggatcccaactatttgaagcaaatcacacgggcagaaattgtcaatccgttcaacggtaccgagagagtggtgaagaaagacgatcaaccggcagtggagaacttgaagaacgtcagcaacgaagggttcgagattgtgctgggtccgatgcagattcggaccttcgtgatgcagctggagtttaggccatagacagattttgcagttcgaaaaatgtagggttttaagaacgactgattctatcaaaatagagtatgtgagatga

SEQ ID NO: 995 - DNA, 3116 bp, Aedes aegypti
ccggtaaataatagcagtcttcgggtgagtgattggaaacgttaacggaattgaaagtgcaaaatttcatccccggaaaagttggtgaaaaatctagaagccagtctagaagtttttttgctttcggctctctggggtttgggagaatccgcggaagaacaagcagaatattggtgtgagggagaggaggctcttttcatcagagggaaattttggatgtgtgttgtgtcgagtttggctgtcaaaaaataaaaagagcaaaacgtcagccagtggtgttggtggtggataaacatcgcatcgcacacttcgtggattctgatctcgtcgcagttttgacaagggaaggaaaattccggacgatttcttccttttttcgaagtgtaaggtgttcgggggcgtttgttttgctggaagcaggttgcataagccagataacagtgtgcaagaaacgcctttcaggtccggaagcaggaatttggtacgccgagtgtgaacttcctgtcggaagagtgagaatcgatagatcctaaagggaagtgctgtctgtgctgagtggtggtggaattgtggacgcagaaaagataattgacgacgacagtgtggaaggcaaaaaatgaacacaaaatccgacaccaatcggcatgtactaacgattcaggcgaaaaagaagcgtcataaggcagcgaagaaaaaggccaaacaacaggcggccgcagcggcagcagcagctcagaaccagcagcagagggagcaaagccaggtgtcttccgataatgagatgaatccggttccggtgaatgacaatcaacaacagcagcagcagtattcgagcttaaatagcagtaataagaagaacagcagctcgaatgagagcatcgacgatccggacgagaggctgctggatgacgctgaaggctacagtagtgatgaaagggaaggcgaacaggaaggccgagaggattactgtcggggtggttaccatccggtaaaattaggagatttgttcctgcagcgctatcatgtcatccggaaacttgggtggggtcacttttctacggtgtggctcagttgggatctggaggagaaacgatacgttgctctgaagattgtcaaatctgcacagcatttcaccgatacggcaaaggatgagattcaaattttgaaatcgatacgaaatgccgacccggccgatccgaaacggaacaaaacggttcagctgttgaacgatttccgaataaccggagtgaatggcactcacatttgcatggtgttcgaagtgctggggcacaatctgttaaagttgattctgaagagcaattaccgaggaattccagtgcctaatgtcaagtctatcatccgacaggtgctggaaggattagactatctgcactcgaaatgcaaagtgattcacaccgacatcaagccggagaatgtcctgctctgcgtggacgaaagctacatccgaaagttggcctgcgaagctacggaacttcacacgatgggatgtcgtctgccgtattccttgatttcagctgccccgccacaattccaggagcagccaattagccaaaacatgagcaagaccaagaagaaaaagctcaaaaagaaggccaaaatgcaaacggaactcatccggcagcagatggagcacatccagaagcttgaattcggtagtttagagaacggagatgtggacgccagtttgaaggaaaatcaggttgattgtgaatctccgatagcctcaccggaaagccctcggcttctgaatggggaccgatccggatccgtatcgtccggcgatgaagatgaaccatctcccaaatcggcctccaaaccaaacgccacctccaacacttccgccacgcccagtccggatcagtccgcttccaacaacaatgacgactcgattaccgagaaagcttcctcatcacctctcccgattgcctcatcctcagatcctgcctcatctagcaacaagttggatatcagcgcttcgatgcgtcggatcttgtcccgggtgaaagaacgcaaagacccgaccttcgaagtgtgcgacgtcgaagtcaagattgccgacttgggcaatgcatgttgggtggacaaacacttcaccgaggacatccaaactcggcagtatcgctccctggaagtaatcatcggatcggggtacaacacttcggctgacatctggagcacagcttgcatggcattcgaaatggccaccggagattatctgttcgagccgcactcgggcgataactattgccgcgacgacgatcatattgcccacatcatcgaactgcttggtcccatcccgaagcggattgccctgtccggtcggatgtccaaccatgcgttcaactcgaagggtgagctgcggaacatcaccgggctcaagccgtggggcctcgtcgaagtgctgcgggaaaagtacgactggaagctagaggaagcgatcgagtttagtgatttcctgacgccgatgttggattacgacccgaagaaccgagcgaccgcagctgagtgtctggcgcattcttggctgaagcactaaaatcaatcgaagcggagttttgtgtgtgtttgggaagaaaattgtaaagaatgagcgggaaacgctagaagaaaaaatcggtgatacgtgtggcaagtgaaaacagagaggaagagagccataaatgatattgcacagtgcacggagtgggagggggaggggcgaagaagaatgaagaatgacaaaaggatacgagacaggaaaatagcggaggagcggaagaggaacgagaaaaacgcgcggcggctgaggataataagatacaactaggaaaattcacatcattgcatctgcgggagaaataccacgacacgcgaatgccgctacatgctgctgcggcaagctgatggggtgctctcgctaaatggaatcctgccgcaggaatcaaaatcaccactggacacaaaacagcaagaagaggaatttatgggaagttagtaacaaaaattgtttcaaccctagacacaggctaaagagaaattaaatcataacggaagcatatgaagcaacacccagacattatgaaatgagataataaaaaaagaagtaaataatcacc

SEQ ID NO: 996 - DNA, 2369 bp, Aedes aegypti
agttctcttccatcattcgtgcgcttcggttcgaggttctacaattttaaattcaacttctatcagcagggctagaaaagtttgtaggaaatccctaccccatcaacatcagttggaagtgcagtgcaatcggttctattatcactcataggtatagccagctccgagtatttggtcgcggtcggttttaaagatagaagcgttgttttggtcgcgcgccacacgaagttatataaagactgcctcttacattttgtgtctacggattgtgtcaccagtgctcttggttggccgcagtattccttcggagtttgtcagcggaagttgtgcttttcttttctgtgtctagttcgttcccttcgaatcttcccttcttatcatggctgataaagtgaaagtgtgtatcgttggatcaggaaactggggctcggccatcgccaagatcgtcggcgtcaacgccaagcggctgccgaacttcgaggaccgagtcaccatgtacgtgttcgaagagatgatcgacggcaagaagctcaccgaaatcatcaacaccacacacgagaacgtcaagtacctgcctggacacaagctgccagagaatgtcgtcgccgttccggacgtcgtggaagctgccaaggatgccgacatcctcatcttcgtcgtgccacatcagttcatccggggtctgggagcccagctgcttggcaaaatcaaaacctcagccgtcggtctctcgctgatcaagggcttcgatgttgccgagggcggtggcatggaactgatttcccacatcatcaccaagcacctgaagatcccctgctcagtgctgatgggagccaatctggccggtgaggtcgcagaggaaaagttctgcgaaactacgatcggttgccgggacatgaagatcgcccaaacgctgcgggatctgttccagacgcccaacttccgagtggtggtggtagatgacgtcgatgcggtggaaatttgcggtgccctgaagaacatcgttgcatgcggggccgggttcgtggacggtatgggactgggcgacaacaccaaggcggccgtcatccggttagggctgatggagatgatcaagttcgtggacgtgttctacccgggtagcaagctgtcgacgttcttcgagagctgcggcgtggccgatctgatcaccacttgctacggtggccgtaatcgtaaggtgtcggaagcattcgtgaagaccggaaaatcgatcaagcaactcgaagatgagatgctgaacggtcagaaactacagggcccgatcactgcggaggaggttaactttatgctgaagaacaaaggcatggaagacaaattcccgctgttcaccgcgattcacagaatctgcaccgcgcaaatcaagccccagggcttcctggattgcttacgtaaccacccggagcacatcttcgaagccaaacacttgatgaagttttgaagaccccgtgtgactctctgtgccgtgactgaagaagacttgctttagggctttttcaaaattcctgtatcatccgctgctacctgcatgtgtatttgcatttgtgcgttgcatttacgtagcagcaatctcttcaatccggaacccgccgagaggtttgcttcagcagtgtagcttcctttttcccgcaaatttgtgttgctcacattttcctgtacccagtcgcaatcaaacatctactacatccaccgtttatttgttttatatttgttctttctttctccgtacacttttaggaaacaacgggcaaaactctaaatcaaattcaaaactaaataactaatctagtactacaagataagattcgctccttccggcacacacactcgtatacatgcacggtactatcagaacaagaacgcatcaagcgtgaaagtgcggcgtgtatgcgtaaacgtgcaattccaaaaactcgctctagctctagtactacttttccaataacacgtaactaaagtctgttcgttttgattcattaagtctgtcgaaatatcaagatgctaagtatttctagtgtgttttaaaaccagttgatcgttcctttgttgccataaaaactagctgtagtatgagtgagtaagcgagagagaacgaggccattgtcggatacgtgctagtactgcatttataaatatatgtaccatacctaaacaatcgatcaaagaagccattcgttccacatttactgctacacacatacatacactgaaaacctttccactgaagaacgctgcgctagcagtcagtgtgtgttttttgttaagttaggttaaaactgccttttatcttttataacaaaatataaaaaccaaaacagtaagcgcattgcaaatggtaaataaaatttgtc

SEQ ID NO: 997 - DNA, 5624 bp, Aedes aegypti
caacacacgaaggaaagctgttcgtcgtacatcagctgagtgtacagttagtacaattacaaacgccactgtagagagtgtgtgtgcactccagacctactacgcacactcgtgcacattccatgacgtactagatccatcggaaccccgagctctgcgaaacctcactgggcccgtcattgtagaatctaatatcgaatcgaatagttctttgttactgatattggggtggtgaaacaaaagtgagagccacagtcacggaagcatccgggtactaggccagccctcagtatgtctgtccctgtacgctgctattctgtcgatactatgaacaataccatcgaccagcaacagcacgtcggcatcggctgtggtggcaacgcccgtatggatgacgacgagccgatgatgctgcgcaaggttcatgtatcagaggagatgcaacataatcagcggatgttgttagagggccggcttgggacaccggatgctgctgatgcagttcttatggagtcgcaggagggcgctcaggccaccggcaacggctacggcctgacgaccggagcgaccaccagcaatggcagccacctcgccggaggtggcccacaggacttggccggagccaagtcgctatccccacagaaacagtctcattcgacgtcgcccctgcatcagcagccccaagccccacagcagccagccatgtcgttcgagcagatgatggccaagctgagcgaactgctcgccttggagcccaagtaccagccgaacctctacctgccacagcagtcatgcaatggcgagatcaccatcggaacccgggacggggcagcgcacgtgctgcgttgcctcaaggtctggtacgaactgccgaacgacgtcctgttcgcggccattaacttggtcgaccgcttcctgaccaagatgaaggtccgtccgaagcacatggcctgcatctcggtcagctccttccacctggcggtgcagcagttgaacctgccgcagattgacaccgaagatttggtcgctatttcacagtgccgttgcacgtcacgtgatctagtgcgtatggcggacattgttgccaacaagctcggtgtccagatgaacagcgccccggtgacggccctctcgttcatccgactgttctactacatcttcgagaacgccgcgaacgccctcgggctgacggacatcttcgcgtctgccgtctcgctggccgacctggaaatgcgtctggagattctggcctgcgatgccagctgtgccagcatccgcccctcggagctggccctggtcatgatcttcacccagatggatgcccacgtcagtgcgaacaaggaacacgggctgtacaaccagcagatccacgatctggtggactacgccatccagctgcaaaagttctgtcggatccccgacagcagcttcttctacagtcacagtattgtcgccaagatcctgtcgcagtacaacggccagcacaagatgccgtacaagcagcggctcgtctggaagttgtcgtcccgcacgatgaaggtgctgcgcccgaccgacaagctcacctcctacctgcccaccatcgcggaacatcacgctcacaacagtcacgttaacaatagtaaccttagatttagaaccggcagcgtcagctcggaagatgacggcgaagattggcccacttcacccattgttgcagtttgtgaacagtttgacgagtaaaacgatccccagtctttcgcgtacacatatagacagagacgctctcgcgacgagatcgcgagttattcgtttcggagtgatcgttcgatcgttaattagtgagtgttgtcgtcgtcgtcgaacgaaatctagcaaaaaaacacatagaggaagaaaaccggaattatttggatagctactacaagtttaggaaaattatttttttggttttttcaaacccaacaagtaacacaacacaaatcgtgactagaaaagtgttataaattgagcgttgattaaaggaagcgattccccccgcggacgggtcggtgaaacagaaaacagaaaaaactgtgtgcacggtgtttcttttctgaaagaagacattcttttcgggagaagcgaaataccggcggagaggtggactcttggtggcggataatcggaagtccgatcgagtgagagtgtgaagaagacttaacggagaagaagtggaggcgaattgcgaagcagcggagattcgcacgtttcagtggtctggtgtggtgtggattctactgagagcgtggaaagtcatcactatcagtcggatagtacagtgtggtgtgtcaagtattctgcaatccctatctggtcaacaaacaagaacgtgctgcagaggcggaggcagaataaacggaacttgcaggaaagatccgtgtgtgtatgctggattctcaacggagaatcactaacattacatcaatcaacaacaaaacaaaacatcaaaaaaatctacgtttaactacataaacacgcaccctggtgaagacagagcggaaacgtcggtgacgcagtaggcactggaggtttgacagtgcgagagaggaacgaacggaccaaaaccatcgtgacagcagttcttcggatcacacgtcgaggccttccccggaaaccggccgtcatcgcacgtcgcttgtcgacgcgagagtgttcgctagtaagcattatattatacttttttgattttaactagatctaattaaatacacacatttaattaatctaaggaaaagttaaagcaaaatccacaaagaaaaaaattcaacaaaattcttgaaaaatcccatactaaaaagaacaaaacagaaagaaaaagcataaaagaaaatcaaaaaaagtacaaaatatacaaaaggtaaaaaaatctaggacataggtgtttaaagaaaacgtaaaaatcaacctaagcagaagcaggcgaacatccaggaaaagaacgagaattattcgagaaggtttaacaacaacaaagaaaactagcggacttgacattgaaaacagaaaatctcacacaaagaagttgaaaatcgtgacagcaaaacagcaaaacagtttatcacaaaaaagccagtactgattgtgttattagatattttacgcaataaagcatacaaaacaaaccttataataataaaacagagaacgaacagttgtaaagcttgtgtaatttttgtagtggaatttctctcatttcttcttgcaaagcaaaacgttaattcacttctagattccaaacgtgtaataaatcaagtaaacagataagtttcctctaatcaagcgcaaagaaacaatacaagcacgttgcgaccggagcttcaaatccggaagtaacgaagaaaaatatcaagttatattatctaacacaaaaaaacactgaaaaaaggtaaaaattcaagccaaaaaaagcaagtcatttcaatctgtgtagtagtgaaaattgtctaatcgctttctattaaacgaaacaaaaaagaaatcgaaacacacagctataaacgcagttgaaaaaatacataaacaaaagaaaaaatagtagagaattaaactacaaaaaatagttaatcaagtcagattcaaaccgaaaagggaaaaaaagcagaattcaaagcttaaaaggccacagcgcgcgtttgtgtttttgacgtcgttgttgtagtagtagtagaagcaactgtgagataggagtccagaccccaagtcgtcgcattatcaaaaaaaaaagaacaaaacgaaacaggaaaatctctttttccgcgtcctccacttaatcgcaggggagagaaacccacgaaccgaacaaatggcgatgaacgtcgtactgatcgtggtcttcgcggtagcgacgacttcctccggtggaagtcgcccttcgcgaggaaacagccgaaagaagaaaacttcgtaacgaaggcggggatggggtggttgggtttccgattggaaacgtttcgaaggcgcagctcaccgtggcatcgatggaccgatggaccgctccggaagcaaaacctctgttctatcatttttttatttcactgttgtctgatctcgaatactttcggcgcgcgttcgagtcggttcaagcctcgtgtgagcggttcggatacccaaacatctcatccccaccagttcgtgaaaaattaacataaaatacctttagtaaaatgaagaaacaatgaaacaaatcttgtctctgaaagtataaaaaaagatgaaaaaattaaaaagcaaactgaagaatatagtattttaactattaaatattaatttataaagcaaagttattgtgattcgatttatttaaaacgtaaaacccgtctcataggcaaaacgcgggcggtacggagcaaactttacacaagagaaagcgattgctaaaaaagaaacaaaagaatcagaaaaggatatcttttttgtgtaagtctgttatttttttagaaaaaagcaaaacaaggcaaacactattatacataaacatttgtgtaccttcctttctcccattttttgtaaattattttcctgtttttaaacaaattatttatttatgaaacaaagaaaagaaagtgaaaaaaacaagtgcaaacaaactgagagagacactcactaacttatagagcaaagtgactaccagtcagcgcagagcgaaatctaaaagaaaaaaagagagagatatagaagaaagcaactgagcataaaccgaaaaagagatttttatccacctaattccatcgcgcgtgtgttagttttgttttctaaactaagagaaaactcatccaaaccgagcaagcagattagaagaggtagaagcacttcataattctcgttcgcatagtttttattttttgtcgtaaatcgtgtaatcgtacttccaaaaaatacaaatcttttttatacataatatgtgtacgtatattttccttactcctcccgtactccccttctcattccccctcttgtgttcgttttaacctcgcacttttccacacggcgaaaccaatccgtcttcactggtttggggcggaagttccgtgtgcgcagaatcggtgcgctaatctctattgcgtttttttacgtcgacatcccccaaccacccctcgacatcctcccccaccatcgtaattaatatatacaattgtttagaattagttgataagaagcaacaaactgaacgcagagaagtaggagagtaataagagctatcagatgagacctacgaagagagagcctccgcgtataaatgattattttgaaagagcagaacagcggagagcgcagcagagagagtttcagaagcgtacacgcatacacacacaaaaaagcacggattttaacacgaaatcatgaaccgtaaaaaaaactatttcatgtctgagcagaagcatgcaatgagagagatagagagagtgaagagagaacaaaaacatgaaaatgtgtctctgatgaattataattactgtatgatttatgtatctcgtataaggcaaaatgacgaaaagaaaatggaaaatgtgaaaacaaaagaaagaatgacataaaagatgagaaaaaatacgtggaaaatggcaattacagattcatttgggaacaaatgaatgaaaaaataa

SEQ ID NO: 998 - DNA, 3649 bp, Aedes aegypti
atgtcacaagcgaagaaatcgaaacgatctaaaatcggcgagcgcgtggcggctcatttggctaagcactttcaagtgaacagagagactctagctgtggacggggttggtgtcgcagcagccgtcgaacgcccatcaatcaagtaccagcacacactcgaggtcgtcctgtttcgctacacatgcttccaaccgattcggagacaccatgagtcagtactacttcccgatctttctggtgtttctgctggaactctttcgactctctcaattggtcaacggaaagcacaagtcgaatggcaccagccggacgatgattggaacattcaaaccgtaccacgaagcgtacatccactgcttgaaaatcaacacaacacgcatcggttacctcccaccagctaccacgtgatagattctgaaaaccacgatgataaggttctgaaacgacttatggaaatcaaggagaatgccaccgctcgaacgctgttctcctacaataaagaagaatcgcatctaccgccactcctcactaaaacgatcaagtacttcaacctacaacaggtggccttcgagctggagaccagtgttatgtcccaggtatcttgtacagcttgcaaagctggcgctggactactacagcactacatccgcactggcaagagcaaagaagagatcatcaaaaccatctaccagtactgcgtgaacctcaaaatccagtctcctcgggtatgcgaaggtgttagtcaactgtttggcgtcgaagtcatctacgttctgaagcgtgtcaccattggccctgatgaaatctgtagtttcatcataggagacgcttgtgaagatatctacaatccataccacgaatgggaagtagactttccacctgttcctaaaccagaaattcgtgaagtaccactaccacaagaaggcgctccagtgttcaaagttctgcacctctcggatacccactttgatccgtactacgccgagggctccaacgcagactgcaatgaaccattgtgctgccgactgacaaacggtcgtcctaccactccaaatggggctgctggaaagtggggtgactatcggaagtgcgacacacctcaaaggactgtcgatcacatgttgagtcacattgccgaaacccattcggatatcgatttcatcatctggaccggtgatctaccgccacatgacgtctggaatcagaccaaggaagaaaacttgaaagtgctcaaagaaactgtcaaacagatgtcagagaagttccctggaatcccgattttccccgcactgggtaaccacgaaagtgccccggtcaacagttttcctccgccgtacgttcaacaggtggacagctcgatctcctggctatacgatgaactggatattcagtggcgacggtggctaccggctagcgtttcgcacacggttcgtcggggtgccttctactccgtactagttcgccccggttatcgaatcatctcgatgaacatgaactactgcaacaacaagaactggtggctgttgctcaactcgacagatcccgcgaccgaattatcgtggttcatctacgaactgcagagtgcggagtttgccaacgaaaaggttcacgtgattggacatattccaccgggtcattcggattgtttgaaggtttggagtaggaactactacaagatagtgtcccgatacgagaacacgatcgtagcgcaattcttcggccatacacacttcgacgagttcgaggtgttctacgatccacacgatttgagtcgagccacaagcatagcgtacattgggccatcagtgaccccttactacgatctaaatccaggttaccgaatctattacatcgatggggatcacgatcataccacacggctagtggtagaccacgaatcgtggattatgaacctcaaggaagccaacctgtacgactatcctatttggtacaaactgtattctacgcgggcagcgtacaccatgcgtagtctgcggcccgttgattgggacatattgatcaacaacatgactgataacaaagaactgttcgatctatattacaaacactactggaaaaactcgcccgttcggccggagtgtgacttcgaatgccgcaagcggatattgtgcgacgccaagagcgggcgcagtcacgatcgcaagtacttctgtgaaggtgtcgaggccaagattgatgaaaacaacaaaggttggaaagactggctgctcagttccatctcctcttcgtacgtagcatataaaaagttattctagaaagaattgtgtttcgcaacgaagattttctttttcttacatctcacgcatacactcacgtgcatactaacgcaaatttaaccgctaaatttgtacatgatcaatcgcacatccataccaattcataatttcagcttacaattggtggcggttggaagtttcacttaacgctagacatagtcgcgcctaatcacacgtgtaaatatctcctgtctccatttcaaacgtattttgtgttatcaaattggcttttggttttggaaaacgatctaaattcatggtgatggtttgatatttacagcggaagtcacgaccgcaatgataacaacagggatgatcgcgatcgtcaaggtgataatgggaaggttgatgccgactccacttaccaccagcaactggttgcaaaagcattggaagataacctatccaatccgagcgttcaattggccaaagggtgaacatgaccatcattaactgaaattgaatatgtttaagcttatttgtaatgtaaatatagaaactgctaaatgtcaataaaatatctaacctcaaactgtctcaagcaagcctttagtctgtatctgctaggttatggccaattaagcaagggcgtggtaaatatggcagtttccaagccatcaaaccagacatgtactaacgatcttatattgtagattatcctatgccctttcgggcttgacgaggatcttctggcgtaagcgatgatccaatactacatttcggagaatagcagcacacccacaaaccgattatcgacaactactaaaccgataggaagacgccagcattacctccttattgatattagaccaagaagtgattgtgcacctctcacaatagaatcttgacgcaatcaacattcgaccttgcgatcgaaaatcaacgcgacgagaaaacaatcagagaatcgataataacaacaatacagcatgccattgatagaaaggaaacaaaagtgttcatcgagtctcgaacgtaaacttcggaagggagtcagactacatgtatacaaggattgtgataagcgtaatgaaaaccgaacgacagttactgttgaacaaatcccttggaaccagtgttttaaacgtacgacaatacaagtcaactcaagcaatgcatctatccagtatgattgtacataaatcatctaaattttaccaaaataaattatttatattataaatgtgacgattagtgtaaaatgtatttgcccgaagtccaaccctcgattactgctccagccatgtttcacaaattgattcttgtagacgatctaccggtgacactcttgcgaccagtacaaatgattcgtgtggaagcaacaggatgtcatttgttgcaacagctcccc

SEQ ID NO: 999 - DNA, 1697 bp, Aedes aegypti
atggcgaaagttgcatgtgttttacttgccgtgatactatcagtagaagttgcatttggagcaaatattctctgcttatttggagtagctagtccaagtcatcatatctggaatcgggcaattgcacatgaattaggggccaaaggacacaatgtgaccataatttccgcagatgtggaaaaagacactccacaaaacattcactatgttgaactcgaacaaacgtatccggagttgtacagcggaccgcacaacatcgatttactcgaaatggccaatgaaaacgtgttaacgtcaattgtttcattctacaatgactttgttattacagaatgcaaaggtatcttgaagtccaaaggtttggaattcgtaaagaattacccggacgatttcaagttcgacctagtgatacacgatatgacctgtggaggatgtatgcatggattgctgcacaaatttggatatccacccttggtcagcgtaacagcattcaacaatccgccctatgtgaccgacgtcatcggaggacataaacacgttgcctatattcctttctactctttgagatacggcacagatatgaccttcatgcaacgcgtccataatacactgttgtacataacagattacatatatcgaacatttttctgctaccccaagctggatcacatggttcgagactacttccagtacaaggacatgccatacgtaccaaacatggatcgtctcagcaaaataatcctagtgaatgcacactattccatcgatttccctgagcccgcaccaccgaaccttattcctgtcggtggactgcaaattcagaaacccaaaccgcttcccaaggatatagaagattttatcaatgctggcaagaaaggtgccgtactattttcgcttggaaccaacatcagaagtgatgaactcggaaaggaacgccagcaaatgttcattgatgccatcagacaactaccggactacaacttcctgtggaagtttgaatcagatttggatttgaagctgcccaaaaatctcatcatacggaaatggctcccgcagagcgatatgctggcccacccaaagataaaaggcttcataacgcatgcaggattactcagtatgcatgaagctacttggcatggtgttcccatgattggaataccttttattgctgatcagcatcggaacttggaaaagtgcattcgaatgggtgtggccgaacgtatcgttttccaaacgctctcaacaaaacaaatctatgataccgtccataaagtactggaatcgccttcgtaccagcagaatatgaaaaaagtatccagcctattcagggaccaaccggaaaaaccactagaccgagcaatttggtggatcgaatgggtactccgtcatcctgatttcgagggtttgcagtcaccggtgttaaaactcggattcctgaagagtaacctagtggatgtcatcggatttttccttctagctcctttagtggtgttcatagttctgaagaagtgcctttgtaagggacgtcatattgatagggaaaagaaaactaagtgatcatacttgtattaaatgtaagagatttattttacttttttgttgtcctcagatactgcagactttttaaaggtttttaaatatttgaatagcttcaatagaatgtacaaaatagttatcaaaatacatagaaaacatat

SEQ ID NO: 1000 - DNA, 2908 bp, Aedes aegypti
ctccgagctgtcaaaaatatgacaacaaaaacctcgcggcccgctctcgcgcacgacacgacagtcttcatcaggattggttgatttggagggtcacgccgctcgctacatacaaaagttggtgtggttgttctatacctaattaaaagttttctgcctgtgtagtgaatgaaacgagaaaaaatattcaatgtgcgctccagtctcgcagtgaaacatcaataattatttcccattcggttgagttagggccaattcatggcaaaggaataattcgtcctcctgcctacaaagtggcgtgatgttgaaacgggttgtcaaacgattagagtgataagtggctgactgaaatctggatgctttctcgagttcccccttctcttatcacatgaaccagtagtctttacagcccatcgaggggcggtagttatattgatcctgtatagaaagcaataagtgcggtgcgtgttacgaaatcatactcagtgttaacaccctggcggtaactgaacaacacctggaagcgcttgaatctcccgcatccttccctccttcttacgacgacgacggtgctgtgatcgttctaaaacgcaggatgaagaagcggacatctccgccgtcgacgctggagaattctccggcgcaaaccggccaccgcagcagcaatgcgcccaccatcaatgagttcaagtacattaacgagcggccggtggacgatatttcgctggactttttctacaagccccacacgattaccctgctggccgtttccatcatcggggtcatgtactttgccttcgtgcgcgatcaatcggaccctcaggagaacatctgggctggcatggtgtgcgtcacgttcttcttcatgatcgtttccgtgctcgcgttccccaatggacccttcacgcgaccccatccggtggtgtggcgaatgctgttcggcctctccgtgctctatttgctgtttttggttttcctgatgttccagaactacaagtccatcatgggtatattttactggtttgaccccacgttacggaattttaaaatcgacatggacaaggaatatggcgctaattgttcggatctttctttcgaacgcatatggtcgcacgtggacgtgttcgcctggggccattttctggggtgggctttcaaggctgtgctcatcagacacatgggcattttgtgggctatttcggtgatgtgggaaattacggaaatctcttttgcccatctgctgccaaactttgccgagtgttggtgggatgcgcttattttggacgtgctcgtttgcaacggacttggaatttggtgtggcctgaagatctgtaaattgttggaaatgagagaatacagatgggctagcattagggatattacctcgacgaagggtaagttgaagcgtgtggtgcttcaattcactccagaaagttgggctccggtgcgctggttggacccgaaatgtacctacatgaggttcttcgcggtgtgtcagcttgtgttactctggcagttgactgagctgaatacgttcttcctgaagcacatttttgagatgcctccatcacatccagtggttattgggagattgatattcgtagggctcttcactgcgccgtccgtgcgacagtactacatctacgttacagacaccaggtgcaaacgattgggaacgcagtgttgggtgtacatagccattctagtttcggaagctattttgtgtatcaaaaatggacaagagttgttcgagcgtacacaggttaaaaatatagtcttttggttatttgtccaagctgctgtttctatgctattcatattcggttgtatgatatggcataaatacgtagatggtgacgaatcacaagagtcatcgccagccaaacagttgagccgagagttcaaagattctgccattgtgtcgggcgattccaaagggaaatcatcggccaaaaactctcctaaaaccactcctcccaaaaaagtaagatctcagcatagtagtgttaaacaggattaatttgtttttaagcattgtgggaacgacaaactcgtgagaacaattgactgaatatgaaagcgacttttctcagttgatttgtgatttctcgaaaattctacgacgattgctgttttcgcactagaaacgactagttaatgcatagttacttctgttggttgcacatattgaccttttgttaaatttagtactaattagttgcaaaacatccggctgaaaacgtgttgaaggtttatttcaaaaagtcaacatacctattatgcatgatttcgtgcctaattctgcgatcaattgttgaatttgctattcgcttttttctttctagtagaactttgcctagtgtttaaattctttgattacaacttctgggtcaagtttagaaaatctacaaaaaaaaaaaaataaataaaagaagagatatgccttgaaatataaaaaaagaatgtgattttgcgtatggattgctagaaagttgagtctgaaacgtgtaacatttcaatagtgtacacagaatttcccaggctaaacttgaatgaattatcgattatttctaccattgctagcgattttagcaaaatgacatatcagtttagaaatctgtttgatcgtgaagcaattgcaaaggaatgtaatttatttagtttacattgatgtcatacaccagtggagtacaatgtcgacagtaatcgatatgaagaacacccgtcagatgctagtactattatgcatgaacgtagtatgtttgtaaatcatgcttcctataggtttccggaattgtatatatatagttgatttgtgttttcagtggaagtttctagtcaataagattcaaacgaaagacatttgaaacataattgtaagaatttgaataaaaaattaacaataaaa

SEQ ID NO: 1001 - DNA, 1510 bp, Aedes aegypti
atgctccgggttcccgggaccaagtggtgcgggaaaggttggagcgcgcggaactacgtcgagatgggcggactatcgaaggcggaccgctgctgccgacagcacgacctgtcctgcccgttttggatcctgggcttcgaaacgaagtacggcgtgttcaactggcgggtgaacacgctgatgcactgcagctgcgacgagagattccgcacctgcctcaaaatgtccgattccagtgatgccaacatggttggcaaactcttcttcaacatcgtacaatcgaagtgtttcgtactgaagccggaaaccgtgtgcaccaaaacgtcatggtggggcaaatgcgagaagaaaatacggaaaaagcgggcgctgattcgtgataataggaagtactaaaatttatcgcgccaaccctgctgccagcccgtgggtagcttcgttcaccgtactgcgtggtatatctctcacttggcatcagtggcgtcagcagcgtgtttgagaaacactgaacgttacaccgggaggtgtgaaaatcgtcagcactctgctcacgggttcatacagtagctcttgcgaaaacacttgagcactaacgcgaatcagagacaggatgcgccgctatttggcgcccaacacgccatcagaactgttttactttctggcaacctacttaccaaatcaaaaagaaaaattaatattgctagcagcaattaggactggaaatcccaaggagcagtataatgatgttatttattgtgtagaccgctaagtttatttattagtagcacaagctggtgcccgtggcatctcaataattgactccttaacacaacgatgattcctattaattataagaacagttgtaggcgacaaatgtttctcttttgtgtcttataaaatcaaaaagaaaatcggatgccaacgcgagtagaaagcattgccattctcaaggaaatctaacatccatcataactaacgagcaaccggtcgagaatctatcaaaaccgtacaaactccatgacaatttatgcatcggaagcgattgcattgttagtatactattgttctcatcatttcatttccatctatttattttcgaagcatcgtggcattctagggcttaaatcatttaaactataagaaagaactgttgagccattttgaaaatttttagacatagagcttaaccatatagacgtttaaataaaagaaccgggaatttccacgtgtatatatgtaaattattgaattaaaaaaaaacaggtatttgtaggtttaaagcgagttacgataggaattaacaaaacaatatctcgaaaaagtgatacaacgtggatgaatgtttgttcgtaaatgagtatgagcatgagtttgagatacgcagctgaaaattattgattataagtaggtgtacttaggaaactttttttaaatattaaagagaattaaaataaggcacttagaaaatatcaataaattcaacactgtaaataaaacttactgattctat

SEQ ID NO: 1002 - DNA, 1616 bp, Aedes aegypti
caacgggaacgaccaacacaaccactaccaccaatggcggcagtgtggccggcgtccccggcggcgacaacttccacttcaagacgctggtcccgtcggtcgcggccggagccatcatcggcaagggcggcgaaacgattgcctcgctccagaaggatgccggcgcccgagtgaagatgtccaaggcacatgacttctacccaggaacatccgaacgagtctgtctcattagcggcacagtcgatggtatattgactgtgctcgattttatcattgataagattcgcgagaagcccgacatgaccaaagctctgacggatgcggacgccaaacaggcggccgaccgtgacaagcaggtcaaggtgctagtgcccaactcgacggccggcatgatcatcggcaaggccggtgcctacatcaaacagatcaaggaggaatcgggctcctacgtgcaaatctcgcagaaaccgaaagagctcaccctccaggagcggtgcattaccatcatcggcgagaaggagaacaataagatcgcatgcaagatgatcctgcagaagattgtcgaagatccctcatccggctcatgcttgaacgtatcatatgcagacatcaacggaccggtggccaatttcaaccccactggttcgccatttgccgcctcacagaatcccactttcagctccagtaccgcatcattaaactccgcactgggcggcgcactgcccggggcttccgcggccggtttactggtcaacggcaccggactgaatctgtcattaaatctaggtgcaccttcaccacaaactaatcctacagttaccacacaattgcttgaacatattaagggtgccatgagacagtccggttattccgacacggctaccactgaagtccacgcagcgctggcagttctggccaaatacggtgtgctgggcatcggcgtcgggcttcaaaatggaacccacacgacgccactgagcttcctgggtgtgcccgagctgcagcagacgacggcagcggcggcagcagccacggccgctacaggcgtgtacggcgccgtcggccaactgaatctggattcgtacttgcacggtgccggcaccgcgacgccccgtacctcgatcgaacgctacgacgctacctttgatccgttccggcatccgggcacgcaggcggccactccgatctcgatcaacaacaatgccttcggactgaccagcgctacggcgctgaatgcggcggccgcgcaaacgctgggatcgctcagcaagagccccacgccagccgagatgaccaccagcaaggagaagaacgtcgaaatccccgaagtgatcgtcggcgccattctaggtccggccggccgtagcctagtcgagatccagcacctgtcgggggcgaacatccagatctccaagaagggaatcttcgcgccgggcacccggaatcgcatcgtcaccattaccggtgcgccgaacgccatcaacgttgctcactacctgatcgagcagcgaatccaggaggaggaagcgaaacgggcctgccaaacgaccacggcagcagcggcggccgcagccggaaagcccactgccgccacggtggccgctgtcacgcagtaa

SEQ ID NO: 1003 - DNA, 8727 bp, Aedes aegypti
gcagcagcaacaacaacagattatacagcaacaatcgccacaactgccgcaaatgttacaacagcagcaaatgcaaatgccacagcagcaacaacacattcatcaaatgaacccgttgcagcagcaacaacagcaacagggacagcaacaactgaactatgccaagcaaagtccagttcatcaacagcctccatccccgttgctaagtcagggtggcagaactactccttcctcttcaccgatgccgcctagtccaatgttgtactatcagcaacaacaacagcagcagcaacagcaacaacagcaaatgattcgtcgtccaccgagtgcaggatcgcaaggtttgggccctagtcctggacagtacatccaacaggatcccatggaagggaacgtcgtgaccagtgtcgctagcaataatgccagttctggtggtggaggaggaggaggtatcaaccatccatcgaaccccattccaataatgccttgtttcggaaagtatggctacataaaactaggacttcggggaggatctccgatgtggggtaatgcgaggggtaatccgtcaaagggtcccaatcccatggggcatctgcagcaacagctgcaatctggaaataagccccatggacaacacttgccaggaacgactttaagtcaggcgggtccttcgctacagcaacatcagcaacaggtggaagctgcgaaaaaagctgcaatgatgcgcagtagattgaccatagtgcaaaaagcttctcaatcacagcaaggtccctcggaggaaattgttgtgatcgatagcagtccagatgagaaaagaagaatgatagattatgatgacgaaaccgataaacgattggtcactacagaggtgtctttgagttccgttgcccagccagctgttgatggtgaggagataatggaatcgtttgctcacagcagatacgacatcggggcaagtccgttgggtgcgcatattgagggaggagaatacgaactgtttggtcaagatgtggtcacatctgggaacaaagatggggataaaagtttaagcgtggaagtgaacaagattactgttgctaaagagggcgaacattcacatgctggattgatgagtggagagaaatcgggacaaacgaatgaacgcaatatcgctaccacagaggattttgaagcaatgatagatagtcgtccaaaggacgctgacggcaagcaagacgacgaaaccaaggattcaacaagtgatgagtcgttgaagactggcatgaaaactcctacaaaagacgccactgtgatatctgtaggacttcagcaaagccctaagccaattacgtaccccggacgaattgctattcaaaaaaccattcttcaaaatcgacctcaaattgtgacagcggtttcggctgcccataaaaagctcgtcaaggatgcgacagaaagcgcgaagctatccataggaaacacaaccatatctgtaccaatattgaagagcctctccatgtcagcaactcctccgaaaaccccaaccgaaggaacaccaaccagtcaggcgaagcctgttctatcaggtcagcccaaaaagattatcacgtccaccgccatctcactgagcaatatctcgaaaagtacgcctgggacagtcatcgctgtggcgggacaaaaaatcaacaccaccagcatagtgcctctcacttctttgaaccttaatcaatcgtcgccctttatcacgaagacctttgcaagaacaggtccaaacgcacctcagcacacccaagttcagcacccaaacacatcgcagataaaaattcagcaaatccctcaatctatggctcaagggccaagtgcaacgcaaactcacccatccgtacttcagtcagctacaagcgagagcgtcgtcatcaagtcgaaaccaaatgttccatcgccaagtatgggctatgccaaactgtcctcgctaacggtcacccaagatacttcgctgccgactaaaatctttgaagacgattcaatatcgccggacagttccatcggacaggaagattcggatcatctgggaatggacaaaatggaaccgccgatagacgaagcttcacgtgctgatggttcggaagttgataatcatttgttagctgcccatgagggttcgaatgactcccattctggtgagattaagaaacatggcgtcattccagtgcatgttatttcaaaatcgagggaaaactcaaagagccccattcttggaccagcaggacaacgtgtctcgacaatgccacagctttcacctctgtcccaacccaatgagctgaccatgaatgcgatgaatgtgtcccagcaggtgcgctcgattatgtcttctatcaattcgagcaccattcaaccaggatcttctatcaaaacggaagcaagtggaacggtaattaccacaactccagctacttccgccagcgcaatatctaccatatcgtttgatacagtgataccttctcagggtgacaacatgagcaagccagagactattgcaagtattcttaagaccgtatctggaaagacaatcctcccagcagctgctgtagcgaacgcatccagtgcaaacaagtcggaacaaggacaatcggtcactactacgatatcatcaataccgggaaccaagctgctgaaccaacagttgcaaatcgggcgtgtttctccggccgttcctccaagtggaagcaacatcgtggttgtgaagcaagtgcgagctccgctgcaaaaacagattagtcaaactcaagcacagaaacaacaactggtggtaatgcaacagcagcaagcattgaagtttcagcaaaatcaacagcaattacaaatgcaacaccaacagcagcagcaacaattgcaacaacaagcttctcaacaaacaggcgttatcatacagggtcaggggcgaatacagaccatagagattccgaagagcactgtggataacagcagtaccagtagcatagccagcatactgagtagcactctgcaacagtcgcaaactaggattgtaaatttcagcgaaatatctactaacacgagtcaaccgccaggactagtcgtaacgtcccgaccaggagtgatatctacgcctggtagtggtgttctgttgaccagcagcagttctgctcccacatcatcgactacaactagcatcctgagcgccaccttatctcaaccgatgcaatctatgaaaatgagtacaccgacaatttccacattgcttcaaaatcaattgcaagggtcatcgttccggagatctaaatctaccgatgaagtgccagcgggcttcccgcgagaaccagccggtcaaactgtgagcaaacggcttagtctggaagcttcaaacaccgttaaaagcgaacccatggatacaacggatgataataatgtgtcttccacgtcctcagtgggttcaactacgggacagggacaggccagcggttgtaaattctcaaccatgtcaacaccttctggaactaaggctgaatccgatagtcaaaatgttctcttgaagcagcttttgcaaaatacgggctgtacttcggctccttctccgacgccaccttccatggcacggccagttccaagtctgataacgaatcaacgagcaccaagtctcggtgttgtaagctctttggaagcccaacttgctcgtcctgttattccaccatccacgaatcctccagccatacaaattatcagcacacaagctgtaacgatacccacttcaagtcccactccaaacacgtctgaacctcataaggtgactgccacgaaaatagtctcccgggaaacgtcgttcgtgtcgaaacctcccacagtttcaatctcatccagtcatcctactccgcttctgtttgccaatatgcgcgccgcaagcatgaagaaggaagaaatgctccaagctgcagctgcttctgctgctgcagcatctgcagctgcttccggttgcgtcacagcacagcccatcaccgttcaaagcacggtgaaaacagaatccggccaaatgaccgttacgcagatcacccatcccgttatacatgcacaacaaccatcgcaacagatgcttcagcaacaacttcagcagcaatcacagtcgcaaacgaatcaattgccttctgtttcgtctgctgacatggccaatatgacaacctacataaagagagaacccaccccagttcaatcgatgaacatgaaacccccggaacagcagcaaccacagtaccagcagcatatgctacaaaacgcacccaatcaacaacctcaacttcagcccatgtctcgtacgccaacaccgatagaggtgaagaaagaattgcctgacgatgctctttccggtccatcgccggtgttcccttcgccggtcccaacccccacagatacagtcaaacaggaactttctttcacgccaacacccgccaaagaggaacccgttgaacaaccctcgttagaagctgctgccaaaacagccgccgaaatagcccacgagctgaagaaaaagaaacgacgagagtatcagaaaaatcgacgacagcagcagatccaatcgaacaaagaaccccatcagtccaagaagaagccacgtaaatccaccaaacttgaagaggactacgacacctacatcgataacttgatgcttcagctacggcaattgcctccgatgcaaatcctggaaccacttcttccacgaaactacggcatctgtcaactgtttggtactggcgatctcaccaaattcaccaacatgaagaacttctcgattgcaactggagatctcaccggtacttacgggcatgcacaaatccccaacgttgcagatttctataacaccaaaccgtttggcgtgaaagtacccccaccagaaaccgtacctccttcaactcagcggggtttctacgatcaagagttcccgcccatcaagttcgaaaacgaggatcgctgccgatacgatttcgccaaagaccgagatttggattcgccggacacgattgtgagcacgtctagtcccgaatgcgtccgctgggagtccccaatccacttccccggattacgagtcatcaaggaggaaagcaacgaagaagatcaaaccatgatcttcaagcggatgtctccgatcattccgatcgtcgctcccattccgattcggctgaagaagggcatttcactgtcgtctgatcgatcgctgagtttgatcggccccggaagcaataaggaaaatgaaggcatcaaagaaccgctcggcattaaatcgagatttggcccaccgacgccccttaaagattcgagtaatgttacggttaccctaacgttaacatcctccgctgcggaagatatcattggagtactacgagaccttgccaacattctggaaattccgccgccaatgtcgtaccagattgtggagcgaaccactactccgcctagtcaaaagcttggtctgtaccggactaagggacgcgatggaaaagaaggagctcccatcgacatacaaaccatcctgaatggagcagccaagttctgcaggcattgcgacgtagtgatactgaacacgctgataaccgcaaagccttcggaattcccgttgctggcaaacgctgtgaatcaggatttggaatcagaagagctgtacttctgtagtaaggcttgctatcggcagttccagtggcgtccgacgaatattttggaagataaactgctcggcgctgatggaagcaaactgcgcgaaaacctcgcttctagattcgatctagatatggacgaaagtttgagcatgggtgcaatggacatcaagcaagaactgaacgaagacggtgatgtcagcatgacaagcatgcgttcctcggatagcaaagactcgtccatcaatgagcgcaagaagaagctggatgagtccgataaagaaactggaccacccccgaagcaattgaagggagtgaagtacaagctgtttgcctcgaattgtttccaaatccagaggtacaagaagcctaccgagaaggaaatcacggaaatgttgttccgtatgagcatcaccgtaacacccactccaaaaatgccggatgataccagacgttgcattttctgccacacgaccggcgacggagttgcggatggtccttcgcgtctgctgaactacgacgtggacaagtgggttcacttgaactgtgctctctggtccgatggagtctacgaaaccgtaaacggtgcattaatgaacttggaaaatgctcttcagcagagtctgagctcggcctgtacgttctgcaataatctcggagcgacaattaagtgcttcaagactcgttgcgccaacgtttaccatttgagttgtgccatgaaggatagttgcgtgttctacaagaacaagacgaccatgtgtcaatcgcatgcaccaaagaccgaaaaggactccgaactgacgacgctgagcgtccaacgccgggtgtacgtggatcgggatgaaagccggcaggtagcgtccgtgatgcaccactcggagtcgaacaaccttctgcgagtgggtagcttgatcttcttgagcgttggtcagctactgccccatcagctgcagaatttccacactcccaactacatctacccgatcggatacaaaattatacgtttctattggtcgatgcggcgcccgaacaaacgctgtcgctacgtgtgctcgattgcggacgtgtgcggtcggcccgagttccgagtgctggtgcaggagtcagccgaggaagacatcgaactccgtgacatcacaccgaaggccgtttggcagcggatacttgacccgatggccatcttgcggaaggatagccaaatagtgcagctcttccccaagtacgttaccggagaggatcttttcggcttgacggagccggccgtggttcgcattctggaaagtcttcctggcatcgaaacgttgactgactatcgcttcaagtatggtcgcaatccgctgctggaactgcccctggcgatcaatccttccggagcagctcgaacggaaccaaagttgaagcactcgctgacgtggaagaagccccatacgcagcgaacgggttcggtcactcagcggccaacttttgttcctacgagctcgccggctggagaggttgcctgtccgtacagtaaacagtttgtacattccaagagctctcagtacaagaagatgaagctggagtggcgcaacaatgtcttcctggcgcggtccaagattcaagggctgggtctgtatgcggcaagggatctggaaaagcacaccatggtgatcgagtacatcggagaggtcattcgcacggaggtctccgagttgcgcgagaagcagtacgaagcaaggaatcgtggtatctacatgttccgcctggacgaagaccgcgtggtcgatgcaacactgtccggcggtttggcccggtacatcaaccactcgtgtaacccgaactgtgtcacggaaacggtcgaggtcgagcgggacctgcgtatcatcattttcgccaaacggcgaatcaatcgtggcgaagagctctcctacgattacaaattcgacatcgaggacgatgcacacaagatttcttgcatgtgcggcgcccccaattgtaaaaagtggatgaattaagcggaaagtcacagtaaaacgtggaccttttttgctgcattctttgtgtactactattagtttaatcattctttaattgtgtagtttggtcagaacatcagatttagttgtatagttgtttagtactctcaatgttttttttcactaggttacgtgtattaagaaacaaaagtcagtttttacagacatccacagctatgatatgacagaaattaattgacaaattgagctagtcttaagggaaaagttataaaaatagtatgtgtttagtgcaagatgtgttagtagagttggttcaatagtgtttatcatgatgtttagttacattgtagctttttttctattcctttttttctgttagtaagactatagcagaattgtccttcaataagaagaaaaagattgctttagctagaagcaccttcgaattagatatacacacatgagggtaagtccgaacatggatcaaatcaaataggttttgtaggagattaagtagcaaaaggaaagtgtacatcagcactagtaaagtaggtagacagagattatttccgatacgaaataaaaaaaaaacgatacaaatacacacggatgaaatctgggattaaggcaaaacaagttattagagcgtatacctagcgaagtaagacacaaaatgtacttgataaacaataatgagcaacaaaccttagcctgagggaaatcaaagaaacaacaaatctagaatcacctccaacagtggacacacgtggaactcccacatccatatattttcagacgattgttttgcaatatatatattttgtatactagatcataaatgttaacaaatctcttctcagttgattgagaacgaatgacacaccgagtagctgcgctatctttgggtgaaagaagatgtaattattacggattattgcccctgaaccatacggtaggtaccggttaagtatagtgatgcaagtgtgtagcaatagagaaaaagcacttctgtgttgataaaagagcaagaaagaaatcacagctagaaaccttgaagtatacatatttgtaacatataagcttgacagaaggcacggcgaaatagaacagtg

SEQ ID NO: 1004 - DNA, 2903 bp, Aedes aegypti
agacctaaacgatggcatccagactacgcagatttggagtaactgcagccggtgtggcaatcggtgctgccctgtctacatatgccctcaaaagcagtgacatctcaccgcaccatgttcaaatggaggaaatgcagaggattcgtcgcaagcgtaccctgccatcgcgatcggaacaggtccagtcactgcaaagtggcgaagagttcgacgtgttgatcatcggaggtggcgcaaccggtgccggatgcgcattggattccgtaacccggggcctcaagacggcactggtcgaggcggacgactttgccagtggaacgtcgtccaagtcgacaaagctgatccacggtggtgtgcggtacctgcagaaggccattttggggctggatattgagcagtaccgaatggtgaaggaagctttgcacgagcgtgcttccatgctgaggtcggctccacatttgactcgtccgctgccaattatgctgccggtttacacctggtggcaaattccgtacttctgggtaggtatcaaagcctacgattttgttgctggtgatcgcaacgtgaagagttcgtattatttgtcacgagaggacgcgttggagttgtttcccatgttgagaggtgataaacttcgaggcgcgatcgtgtattacgacgggcagcaagatgacgctagaatgtgtcttgcgatttcgttgaccgctgcgcgtcacggggcttcgatcaccaaccacgtggaagtgttggaactgttgaagaagaagaacgaagctggtaaggaagtatgctgtggagcgaaggtgcgggacaacatcacgaagaaagaatggtcgatcaaggccaaatgcgtgatcaatgctactggaccgttcaccgattcgattcgtaagatggacaacccaacggtgaagtcaatctgttgccctagctcgggtgtgcacatagtgttgccaggattctacagcccacctcagatgggcttgcttgatccggacacatcggatggtcgtgtaatcttcttcttaccctggttgaatggtacgattgccggcactacggatgctccttgtgacgttactaccaatccgtctcccagtgaagatgaaattcagttcatcctcagtgagatcaagagctacctgaacaaggacgtagatgtccgtcgtggtgatgtactgtctgcttggagtggtataagaccgctggtgtccgatcctaacaaaggagacacacaatcgttggctcgtaatcacattgttcatgtcagtgattcgaatcttgtaactattgccggtggaaagtggactacgtaccgtgccatggcagagcacacgatggatgcagctatcaaagcctgcaatctgcagccggagcgtggatgtgttaccgatggactgtggattgaaggagcgcaaggttggactcccactatgtatattcgcttggtgcaggatttgggtttggaagtcgaagtggcgaagcatttggcaatttcatacggtgatcgtgcgtttgccgtagccaaaatggctgctctcactggcaagagatggccgattattggtaagaagttgcatccggagttcccatacattgatgcggaagttcgctatggtatccgtgaatatgcctgtacctgtattgatatggtggctcgtcgtttgcgtttgtctttcttgaacgtacaggctgccagtgaggcacttccccatattgcagacatcatggcagatgaattgaaatggtccaaggaggaaaaggaaaaacaaatcaaggcttgcgaacacttcttgcacactcagatgggacagcaagtcaaccgtcaactcaaggagaagattccagtcaatctctccaaggaggaagttgatctgtacaagaaacgcttcgatacgatcgataaggacaagaaaggatacgtttccatcccggatatcaagcgtgcaatgcggacatatggtgatgctgaagttagtggagaagaactccacgacattctacgtgagatcgacaccaacatgaacggtcaggttgaattggaggaataccttcagatgatgtctgccatcaagtcgggctttatctcccactcacgattcgctgtcgtcgctgaacaggaggaaattcgcaaggaacaggaacgcctgcggaagcagattaccgttgaccgctccggtggtggtcaacgaaagtaaactaaagcatgcgacttctacgcatggttatgactaaagatccgttcgatcaaaccccacctcaacccatatttattgtgcgctaactttatcgtcattaaaacacttctcgtacataaaatgttcaaacgggcagggagcatggaaggagcatgacttcctcgaatccctgttatcgcacatttttgccgtcgttgtcgatgtacatatttgtcgtattctagcttctccggatgaagatcgttgttatgctacggcggatggcctattgttttcgagccgttcgtggttaggataggaattttacgatcgtgacgatcccgccaatttatttgttaggctacccgatttcacaaaaacacactatttattgaaaacaattttgtgatgattagatttttcaacgaaacgtttaattttatcgattctacattaagtcaaacagcaacgatgcatccatacaggaaggaagagcagaggagcctgcagtttggttgcaataattttaatttattattaacctgaacgaaatgatgacaattgctgaatattgtggtacggagccataatacagtaatacagtttcgaataagtgaataatgacataatatttattattatacatgatagacaaattattaataagtatgattcaaacaaaattaacgattacctacagaaataaaacttgttcgtaaactacat

SEQ ID NO: 1005 - DNA, 2503 bp, Aedes aegypti
gtaaaatgcaccaatactccaggtacactaaccctagtgggtgcgaatgcgaagatatagaatttacttcacctttcgggttttaaatactttgctcttgccttcagaagacgtcagtcgccatccgtctcgcgttcggtttaagtcgtttaagttgctttgattcctgcgtaaaactcaacttgctggtactcgtgaaggtacttattcgtgcctttcgccacaagtaattagcgatccgacaaagtgttcttcatcggtcgaatattaatattcaatcaaatacctatttgcaaataaatagatgagtgttaatcgcttctttggagacacattttcgtctgaagccaaaaccagttcggcttttgggaattttccataagctgctgaaacgccggacttgtgcagtgtttgttgctagtggatgtgattatgcccgatatcaagattacgcccttgggggccggccaggatgtgggtcggagctgcattctgctgtcgatgggcggcaaaaatatcatgctggactgcggcatgcatatggggtataacgatgagcgccgctttccggatttctcgttcatcgttccggagggtcccatcacaaaccacatcgactgcgtcataatatcgcacttccatctggaccattgcggagcccttccctatatgacggagatgatcggctatacggggccaatttacatgacccatccgacgaaggccattgccccgattctgctggaagacatgcgaaaagttgcggtggaaagaaaaggtgaaagcaacttcttcaccacgcagatgataaaggattgcatgaagaaggtgattgccgtaacattgcatcagagcgtcatggtggacagtgagctggagatcaaggcgtattacgcgggccatgtgctgggggcggccatgttctggatcagggtcgggtcgcaatcggttgtctacaccggggactacaacatgaccccggatcgccatctgggagcggcctggatcgataagtgcaagccggatctgctgataacggagagtacgtatgcgacgacgattcgggattcaaagcggtgtcgggagcgggactttttgaagaaggtacatgaatgcgtcgctaaaggagggaaagtgttaattccggtcttcgcattggggcgtgcacaagagctatgcattctactcgaaacgtattgggagcgaatgaacctcaaatacccgatttatttcgctgtgggattgacggaaaaggccaacaactactacaaaatgttcattacctggaccaaccagaagatacgcaaaactttcgtacaacgcaacatgttcgacttcaagcatatcaaaccgtttgataagggctacattgataatccgggagcgatggttgtctttgcaacgcctggaatgcttcacgctgggctgtccctgcaaatatttaagaaatgggcgcctaacgaaaataacatggtaattatgcctggttattgtgtccagggaactgttgggcataaaattctcggaggtgctaagaaggtcgagtttgagaaccgccaggtggttgaagtgaaaatgtctgtagagtacatgagtttcagcgcacatgcagatgccaagggtatcatgcagctcattcaatactgtgagcccaaaaatgtaatgttggttcatggcgaagcggtcaaaatggaattcttgaaggagaagatcaaagaagaattccacatcgaatgttacacaccagcaaacggagaaacctgcgtgataaataccccaatcaagatcccagtagaagcatctacgactattttgaaagaagaagctaagaagtacaatgcagaaccaccagatccgaagcgaagacgtgtcatccatgggctgctgataatgaaggacaacaaaatctcactgatgagcatcgatgaaatctttagcgaatgcggaatcaatcgtcacgttatcaggttcatttcgaaagtgaaaattgacgatcccggccctactctgcggactattgaaaagctgtacaatttgctgaacgagcgcttatcgggctggaccgtatcgatgaatgaaaacggctcgatcaatgtggaatcggtcaacatcacaatcgaaggagacgaatcaatcgcaggaccagcgggatcggcttcggttcctcctccaccaccaaacgccccaacactgaacaaaatttgcagcgtgtcgtgggttaaccaggatgaagacctgggtagctatattctcggtttgttgcagagcttatagggcttgctagttgtttaagactcgatttaagtgattgatttttgtttatgcaagtttctagtagtagaaaaaaagcgaataaaatgggaaacatgaccttttcctcaataaaagtacaacagttactgtgttgtttaaaatcctaaataaagttttcgttaaataagcgaccgactgccaatctgatgatacgatcgatcgtgtacacactattatgggtcacctaatc

SEQ ID NO: 1006 - DNA, 3339 bp, Aedes aegypti
atgaaaagcccacgcgaggctttactcgtgtcacggtgtcgacctcaataccttgacagcctggaagctccgcgcaatcaatcgctcgaccgtgacttgacgcacacatctcatctaatcctttcgtttcgctccatctctctatctatttcgcagcttcgcaaagagcaggaactccagaagcagaagctgtggcacgccttccaggagaagaacaaggagctggagctgcagcaccgccaacagctggaacacaagtttcaggaactccgcgatcagcgcctggcggaggaagccgcccagcagcgggaacggcgcgagcgcgaagcgatgaagcgcaaggagaagcaggacttcagcgccaacgccagctccgaggtgaaacagaagctgcagacgtttctcatccagaagaagcaagcggccgcctccaacggcatgaactcaccctcgttctatcggaatttgggtgtcgtcaaatcctcctcaggggagtcgatcccggccggtgctgtggtggccagttcgcacccgtacaagattccaccgccgccgccctcgtccatggccaagtacgactcggactttccactgcggaaaacagcctccgagtccaatctgctgaagattcgcatcaagcaacgggtaatcgagaaacgtgccatgaccggacctctcgcagccgctcgccgccaggaacgcctccagcaagccgcccaacgacggatgcagcagaagcaggctcaactgtcgggcagcggcgcagggcaaccgccaacccatccgcacctctcgacgctggccgcccaacatcccgcaaattgcgctgctggaacgcctgactctggcccgaattcaccgcctgccctgggaagccggggttcgccttcgaatgcacccatccaggaagagaacgaagatccacagtacggccctggcggtcgatctagcatcaacgatttatcactgttcagctcaccctcgatgccgaacatttcgctcggtaggccccacctggccgatgcgcactctaccaatcatcttgtgctttccccacagtctatggtaccgctgagacctcatcagatggtggccgccggtcagccacctccaatgtcccatcacccgccaccgttcggacacccgtccatgttggaccaactgacggagcagcaactgcaggcagctgctgcggcggccgcagttgccagtggtctatcgataaaccccacccatctgggagggattcacgctggcgttcctccggtctacggccatcccattaccgatgcccaggtggcacaggcacgactgcacaaacaaggtcatcggccgctcggtcgaacacaatccgcacctcttcccctcggtcatcccatgctgactggcaccggcagtggcgtcgtcaacatcggtcaaactcattacgagaacagtgatgccgaacgccaagcgtacgagcagcacctactcatgaagcagaaaatccgtcaaacggcgctcagtcgagccaactgtgtccgggagccgcaacttaaggaggaggtcgaatccggtgaggtgatcgatctcaccgacaagaagcaacctccgaaaaccacggtcataacctcaaacagtgtcatcaagagcacctcccataccacgttgctgcgagatccggcggaaagcttacagcagcagcagcacgttgagttcctacagtcccaagccctgatgcggcattcgatgcagatcggcatgctggaagatgcctacaatcggtctttgttgcgacctctttcacgaacctcatcgtctccgctggtccacttgggaacgccggcgagtagtaatcacccggtagcgcactccgacaccggtcaagatgacattccaccacccgtgaacctcaccatccagaaccggagccgctcgatgctcagctataccaacgaggggctcgccagctccggtccactccagttaaccacctcttcctcggcgtcggccatccccattcggttagtgcaacagaacgggaagcctaccacaggtcttgcttttgacagcctcatgctgaagcatacctgcgtctgcggggacaatgctgcccatcccgaacacagcgggagactccagagtatttgggctcgattgatggagacgggcttagcggcgaggtgtgataaacttcgctcccgtaaggccactcaggaagagttgcaatccgtacactcagaagcgcattccctcctcttcggtaccaatcaaatcaaccggcaaaaggtggatgccagtggggttagctttgtccgcttgggttgtggtggcgttggagtcgacctggacaccacttggaacgagcaccacacggcagccgctgcgcgaatggccgctggctgtgtcatagacctctgctacaaggctgcgaaaggtgaaattcggaacgggtttgccgtggttcgacctccaggtcaccacgcggaaccgaacgctgccatgggattctgcttcttcaactcgatagccatcgcggccaagctgctccggcagcggctgtcgtcggaaatccaacgggtattggtggtcgattgggacgtccaccacggcaacggaacgcagcaggtattctacgacgatccgagcgtactgtacctgtccatccaccgacatgacgacggaaacttcttccccgggacgggcggtccgaccgagtgcggtgccggtccgggattgggtttcaacgtgaacattgcctggtccggtgggctgaatccgcccctcggggacgcggagtatttggccgccttccgaacgatcgtgatgccaatcgcgcgggacttccagccggatatcgtgctggtgtcggctggatttgacgccgcgttcggacacccagcccccctcggaggctacatggtgtcgccggcgtgcttcgggtacctgacacgggaactgatgaagctggccgatgggaaggtcattttggcactggaaggcggttacgatctggcggcgatttgcgactccgcccaggagtgtgttcgagctttgttgggggatgatttggcgccgattgcggcaacggaactgtcccggccgccgtgtcagacggcggtggagacgctacagaagacgattgccatccagatgacgcactggccgtgtgtgaaacggctagcgcatactgtgagtttttcggcgatgcaggctgtgagtggagcgaccggtccggaccgagaggaatccgacacggtgacggcgatggccgggctgtcgatgcagccgcccaatagaacctcagacatctcccgggaagactcggaggaaccgatggatcaggatgaatcaaagtag

SEQ ID NO: 1007 - DNA, 2104 bp, Aedes aegypti
cctattccagttggggtgtcagaaaatgtcagaaaaaacaagaagaagaaaaaagtatttaacaaactttccggcatacgtggagacgatcgggttcagattcaagttggatttttatcaccctcccccacacccaacaaacgtgtttgcaaacgcattatgcgccactttcgtaccgtaaaacgatgtttctttgataatgtgatccagaacttgcgaaataaaatgaaataatttcttggaatgagttctactaagtgaaagtataattggaaaatataagtatgacagtagatggaggtgaaaaaaaattgaggcgtaataattacatgttgaaatgccgctctgaaaccattatttgacaaagttttaaagagttcgtcacttctgtttgacgccttgttgtagaaaaatttgaattgaattttgtcaatcaaatcaataactcgatttgatagtcagaacttcacttctgctcgggactttcacttgatgcaaaaacataaattaaaaatcttgaaagcagaatgcagatgaattaagcttttttttaagaaactatttaagtttcccccgttttacggtactgcgtttgttcctaagcatgggaataatcacagtgattatccgagtagaagtacaacaatgaatcgaatgcatttgaagtgctgctttcggacaattaggtccgattttttctcccgcctcaaagtctgaaacattatgatgttgctgcttttgttggcaatcgttggagcatacgccacggcttggtggctcttggagaacttaattataccagctgcaaccatcacatggagttcgctcagattgtcagcgagtcggaagaaatcactcgctcagcggtatggcaagtgggcagttataaccggtgctaccgatggaatcggcaagggctttgctcaacaattggcaaataaaggtatgaatttggtgttgatttcccgctcggaagcaaagctgaacaaggttagtcaagaaattagaatcgcggcgggagttgaggtcaaaacgatcgtggcggatttttcccatggagaaccgatctacgagaacatccgcaagcagctcgaatctatcgatataggaatgcttgtgaacaacgtgggagtgatgggacgtttagacgcattcgaaaccctttcgcaacaacaccacctccagattgttaacgtcaacgtactgtcggtgctgttgatgacgcacgtagtcctccctaagatgaaaaaagctggccgaggcatcatcatcaatatttcatctggattggcagtctttcctggtccatatgttgcctcatattcggcatcgaaaagtttcggtcacagctttacgttggccttgcaggaagaacttcgaggttcgggcgttgagtgccaacttgtggtgccaggtttcgtcaggaccaatatgataaaaaatttgtcattcaagaacattggcggaaggctgctgccagatgtccatcagttttgcgccagtgccacgtggctgattggaaaaacgaatcaaacggccggacattggtatcagggcctttggaacgtgctcagcaacctcgttcctttctcgattcggaaaagagtgacgggacttatattcaaatacttgctggccggacagacggataaagttaagcgaacaagcctttgacattactggtgacgaagctatcttacattataagatatgtgaaagggttgttcataaaccaattctccgatatctatgagagggaattctctctcattctttccagacgacaatttagaaaattgtgtggactatagatattggaaacaccaaaagaatcgtcttttcaacatattcacatggttcatgaagggtgcttgtaaaaaacgtcaagtattttagttattataatatgtgttaatcgtttgtcaaccttgataaatccgatgatatgtgttgactgttactgctgtttatataaattaaatgaaaaataaaaacttgcttgtgtctcaacaattgctgagtaggttttattcctcaactgaattcgaaattcctttcataaatcgttttatgtcatcgagcaattggtacctattaaataata

SEQ ID NO: 1008 - DNA, 1501 bp, Aedes aegypti
tggcagtttaggaaagtgcgtgttgttgatcttccggcgtctcacgccataaaagaattgcaaagagaatattctccattaatatgcatatgattgagctgattagtttaactcgaaggcaattttcattcccgcttttccatatccaacgatttttctcgtcaatccgcattttactaatgtgtttgatatcacgttgagcaaatgctcctagtctaaagctttcggtcagatcattaatttgcgaaaaaaaaaatataaaaaaattatatatcaacgaaaaataagccgaatgtcctagccagccggtagcatcactccttctcacaatcgaacggtgctcagtttggccaagtgtgtcgcgaaataaacatcttctcctcagttgctgtatgaccggacagtcgagcggtcgcaccacagcaacaacagttgagaagtcggggaaaaagacaatatacatcgattcatgcgaaaagacctgccgtaactgccgatgagtttgcaacgaatttgtcgtgtatgtctgttacaacctgtacaaatataaaagtgatagtgaaaatatagttcaaagagtgaaaatttatatttttcatgacaaagtagtcaatacattcaatcagacaaaatggattacaattccacgggtacgtttggtggactagagaattggtatacattcttagtggatgatctggcagacaaacggacagaggaactaccattgctttatagtccaatgtggcccatatcgattctgctgctgtattttggagcaatttatatctgggtaccaaactacatgaaaaatcggaaacctttcgagctgaagaacttcatgatcggctacaacctcttccaagtgatagcatgctacttattaattcgtcacttcttcaaacacggctggacgtttgactatctatattcatgcaaattgccggattactccaccaatgcgagtgctgtagggttcatgtatggatcctacttcaactatgtgatcaaggcaatcgaactgattgagacggttatgttcgcactgaggaagaaacagagccagatcagtgtacttcacgtttatcaccatgcttgcacattttccatcgcgtggatatttgcaaaatatgtcggaggaagtatgttgacatacacgatcattgtcaactcgacggtgcacatgtttatgtattcctattacctggtggcgattttctcgaaacaattgcctttcaagttaactgccgtcaagaaattcatcacggtgttccaaattgttcagctgttgagcattttggtaaacgttggattcgctatgcgcagtagttgctcaatccccatggtattggtgctgatctatttgccttatatggtggtgttgctgtcgatgtttttcaacttttattttagtacctacaggaagggtggaatatgtttaaccagtggtaaacaaactagtcctagcattatgcaaaaacacaaagagttataaactaga

SEQ ID NO: 1009 - DNA, 14460 bp, Aedes aegypti
atggccaacggtgctgatgaccaatggctgaaagaggatggctacctgaatgtggacactgaatcggtgcggatcgtgtatcatccgtttctgaacgttatcctggtgtttacccgtgcgggggaagtgaaagtgctggacgtgaattcgggggtgatcctgcagagctaccatgtttccgaaaatctccctgcacagtgccgctaccttcccgaccaggacaaaatcctgttctggaatgggcggaacgtgtcgatgcggggcgactacaatggtgtcctgttgctcgataccatcctgcaagcgccagtttcacaagcggacgacatcatccgaatagagttgctcctatcggaggcggttctcttcgtgcagtgtttgcagaacctcgaacagcatgggctcgagaacacggccgacgtcatcaacgagctgacgctgaaaatcggtgaatcccagcagcatgcgaagcggggcatcaaagcgcagaagtgggaaacgatctgtttggagctgtcccattcgtcgctccggatggtagctggcgaaatggtgatgcagctgaagcgactcgatcgccacatcccagcgctagcgatcgcctccgccatcaatgaacggctgacggatttactggaaggcgcacgtgtcacggaaccatccgccctgaatcgtttctacatgttctcggaagcgacccggtggcaaacgtttgagggttggcctcacatggactacaagtgggttctgccggatcaaatggcccaggccgggttctatcactatccgggggacaatgggaacgacgaccgggcgatgtgttttacgtgcaatgtgtgcttggtttgctgggagaaaaccgacgaaccgtggagcgaacacgaacgccactctccggagtgtcccttcgtgaagggagaattcacccaaaatgtaccgctgtcggtaacgtatgcaacgagtccagcgattgccacggatggattctccatcatatcgtcgggtgatcgaggaaatgtgttctgcacgggaaatccttcagccgatgtgaccgtgtggaatgtggagcgtcagctggtcaaggttcacgacttcaaggtaaaactgcatccggacatcctcacgactacaagcatcagtcgaagcgcagttgtgaacagcatcgaacttacggctctctccacgtattatatgaaacatgcaggacttgttagcaaatcgaaagtggcatcactatctttgaaacctaaaatgctgggatcgaaaattgtttgtggaattcgggttagtagcactgaaacggtggatggtaaggacgaaacgggaaccacactgctgttgattgtctacaatgtggaagagtcaacgtcgtgtgacgaaggtgggaataagcagctgaaccaagcctccaatgtgtctgtcattccaccaacgaagaaatcctcacttagcaccattgacgaaaagtacgaagaagatattatgaagttcttttccggaaacacggagtcccagctgttggaatcgattgataaacttatccatttagaaacgttgaagaaagacgatccttcactgtgccagcagttcggtgcaaagctggatgacacgttgcgaaaactgatcgaaacttccggttccccttcggtgggttctgttgacaaaccggcatcggatgattccccatcttcgcccacgggacacatagaggttgtcaaaggacccacctgcatttcacttccaccaccacccccgtctgccgctggttccaacagtggttcatcaacgcagctgtcctctgtaaagtcctcgcaaccggatagcgtcaccagtatcagcaccatgggcagcagcagcagtccaaacacaaacgtaacatccgccctgtcgacggccaccagcagcgtttcgtccggcaattgtgacatcaactgtattccgctgcagtacatcgagattcccgccgagtggcacgataactatcgcatcgccgaagtgattccctcgagtgacaacaagtacctgctggtggttctgcggctaataccgaaagcggctgttgacgaaaaagaatcgaccaaagacgatgaaaaggaagtggtcgaaaagaaagacgagggagagaaagaggaacatgaagaggaaatcccggaggagattgaagaagcagactggaaaactgttttactgttgtacttcctgactgaagatggcttgataaaagctggcgatccagtggtaaaacagttatccgacgaagaaagtccggttgaaatcgttatgctaccgaaatgtgacagcagtggacgaagcttcggtggcccggacaccgaaaacggcatctttgtaatgacttgcgaggacggaaaattgcgaatattttcgctgaagactttgaacatagtatcggaagctagtgtaaaagacgaccactttgtatcggcgacctactgtaaaagtttggaacgcttgtgtggttgcaccgccaaaggttgtctacatttctactctttctacgacttggacgcggactcaagcgacgaacgagacgacgacgtgacgtgcgtgattggtaatggtagcaaggcagctgctggagcggatcggtcacaatacgctgaagtggatggcgctgcctctagcgcagctgccaatctactgaaatacgacgcaacaccctcgacttcgtcttcgcctccgcagatgccatccgcggtggcaacgggagccagtgtcaccggtgagaaccatctggccgatgcgctcctggcttacaagccagagctgtccctaccgaccctaaaggtgctatattcgctgacactgttcaacgaaatgttgactccatactcggccgaagttcccggctgttggagcgagctggaacaggcgcagaaacagcgacggcatccgcaacatcttcgacccggggacgacacccatctgaccaagacgtggcggctgcataacgatgccaccacctgggacgaacatctcatcgagctgaacttgccaaagtgtacttcgttggggcatatcgatttcaagttttccctttatcaaccctgcacgaacccaccggccattcaagtcacgcttctgaagcaaaagtccatcggactttgctcccgacgcaaaacccagtccatcaatcgcgtggatgaatcaatcaacttcaatatcggatccagcgatggaaaaaatttcatcgaaaatcctgtcctgagcgaagagtacctccaggcgaggaatgcggagattctggttggtccgatcgagctggcagcttgtatggatctcagtgagcaggccggttctgtgacacttaccagtccaaagttgctcaaatccaagggtcgaaactatttgctccacatcaaaacgatgactgacctgtcgaaggatggacaagcgaaaacgaggggctgcgattggttgaacgaaatatccatcaccgttcgctcgacccgccaggtgtacaaaatcgaaaacgaacgcgcccaacggctagccatgctggactccaatctgctgttgcgaaatttgctcaagctgctctacagcgcagacgaagccgtccacatgcaccagagcgtgatcttcgacatactgatttggatcgtgtcgattcgcctggtgcgctatcggtatccgaagaacccatttgcgaagaaggtcgttcccgcgacggagattaaggacgttgcgtccagcgatatcaacgtacagcagtcggagtgcattcagattgtggaacgccatctggaggaaatcattcgccattgtgtggtgaggggcaaccggagcattgcacacaagtgcgtcaagttcgtgagcgtcgctttggaaggagcccagaacatgatcgacaaggatgtgtgcaactcgtttgaaaagtcactgaaacaggcgatcatcacttgcctgccggagatcatccactcgaaccatgcaggagcgctgcgctggttcacgttgttgatttccggaacatccacgtgcgattcccacgggcccatttcggagaagtgcatttcgctgctgaaggatgttgccagtgagatgcgaaagcggagcaatccctacacagcgctgcttcggacgcgctttggactgtacggatcaccgttcgagtcggaaatattcgattcgcaaccgttgacgtccaagaacacgaatgtaacgtacacttgctcgataacgaaaaccaccggaacgggtgcgaacaaccaatcgatcgatttgcgatcggtgtgcatcgcggatgggtccgagttgaagttcctgccgttgcaactgaggcgcaggggaatcggtaatcatttcaagggattgctggaagtagaacctctacactatgtgtgcagttcgacgtcggatgcgacacggctagaaaacgtcgacgccaacaatatgcaggccaccaacatcattgatgatttcctgatggagaacacagctcagaacaacatcgagccggtacagaaccacattaagttggacgagaaggagaatctggacgacgatatgatgaacaacgtcaagaacattctggtggataagatcttctattcagcgttgaagaaacacaagatgaaggatgacttcatcaacgaagcgaaaaagtcggccgaggaaatcgaaatcgatccacaaaatgagagctttagtgaaattggaggctggggcccgtcgaacgaaccaaggatggtctttgtcggtggtaacgtcactgatgcctcctcgatcatagaggaaaagccgcaagcatcgatcaccttgaacaacaaaatccaagaattttttgaagatagcaatgccgacgaaaacgcaaatgggctgccatggcacaagctgctcagcacgcccccgaagcagatgatcgtcgtggaacggatgcactccggagcgatgcgttacataacgctagactttggcgcgcccatcatgttgactgatttgatcattcctgcgtgctcggatctggcttcgctgttcatcgatatctggtgtttcgaggaggaagccgacagtgtgcgattggtggtttcccaagacattggatcgcggacactggttttgagtgatctgcaacctccgccgatatgtcgttacttgaaaatcaccatcaccggacggtacggaatgtccgcaacacggtgtcgcattcccatgggatcattctacggccatatcgtcatcctagatcgagagggatatgccgatcccgtcatgaagtatctgaaaaacaagaaaaacaatctgcccgctcaggtcaaaattctcaaagcactgtacgaagacgttcactgccgatactgtctgtctagcagtaagctcatggatttgctacaaccactgatcaacagcgaatcctccaatattgcccacatgcaagcattcctcaaccgcatcaaagagaacaacggtgaccaaaccgggcctggccactccaacacatctgcgttccaggacaacgccaaagtatacgccgtctacgaggaatgcatggccttccaacaccaactcaatgtcatcaaacgggtcatcgatcggatcaaaatcccagcctccctgtcggatcttccgaagcaactcaaacctggtgccgccgacctgtcaccgatctacaccgacaagctgcgcgttctaagcgaatgccttatcgaaacgcttcttcatctaatcacaacatacggcgtccagaacgtggccaacatttatccgtacttcgatttggaaacttgcaaccttctgttcgacaccctggtcatcaatggggacacccacatccagctggcgacctgctcgatgctggtccggatgtgctgcttccaatcgtggtggggagaattcctcgccgataagttccttaaactgtactcgtcgcaaaacagtcgcattttcccgcaggatcgggtctttttccttctgacgtaccttggccgcaagagcatctcgatgggaagctgccgttcgatagtgatcgacgcgattctaaagagcctggcgaccctccttgcccccttgtcgcaaaacagtgccagcgggctcaacatttggtgcaacacggatctgaatcttctcgggtggatcttgctgttcctctccgtttgcctggacgatgggatggccgatggcaaaaaggaccaaagtaacatacggtgggatttcatgtccggtgaaacggacatggttaaagcgcggctaaacatgggaagtggtggactacgaaccttaaccaggacgttcaagaaacggttcctgcagagcaagcattacagctccggtttgaccgggggcaatggcaatgccgtaaccgagaagatgtacatgatgaactcggatccgctgcaaaccccggccagcaagctggagatggcactgaagcagcacgagaatcagctgaaaaagctgcagaacagtgtcaaacaatcgtttggagattacttcaacgaaatcaccaaagccaagtcggtcagacttccaggtggagagggaggttcgaggagttcccagtccggaagtagcggtagcggatcgaaagataccagctccgacagcagtacaaatgataacgaaacggctttcgataagggtctgaagtcgctcaagatcggtaacataatcgtggtgattcgcggattgattgggttgatcctgagtatggattttacctgcaacatggatcttttcttgatcacctgcaaaattatcgcacgattggtacttgcctgtagacccgttgtccagttgtccaagatcatcaccaccaatcagctgttgcaacttgtgcgaatagctgtgtgggagaaccagcaacagccgtgggctgtccatgcgatcacttgcctgctgcaggacgtgctggaagcggacaaaaactacaaggatgacgagaacgattccggaaattcttccggcgacgaagcaaccacctcttcggaagcaggcgcctccgcacggcctccggtgcccgatacggccttcaaacccgtacagcacaccgttcaagtgtccaaggacatcagctacgcggacgcggtgaaaaatcagctcccgtcgctgatggagtgcgacgacgccgacatggaggacatcctgattctggacgacatactggagcgggagaagcgggtcttcaagaaggacgccagtgcaaccgtcggcagcggacggaatggaatgaccttcctgtacaaaactgtatcatccgcgatggatgcccggctggaaaccggactggataccaatgtggaaataaccctcagaagactggccatgaaagcaacgttcaacttaatcgcgagtctaccccaagtaaccgcggtagatccactcaacccgacccaaatcgaacttaccgcgtggccagaatcgatcgttgaggcttggtccggtgaggaataccaacaaggtctagagaccaacaccatgctgacggaggtgttcgataacattctgtgcgacctgcacttggtagactcctggttgaacctggaaaagatcctacagctttggttgaccctcaatggggaaacgcttgagcaggtccccggtagcaatgcgcccggcttgaatgcgtactcgtttccgaaaataccgttcggggatcgcgccgtgcacggtttactgaaggcactggccacgcatcccaacatcaaactgcgggcgtggtgcctgggattccagtgcttgatcctggcatgtaaaccacacttcgaagcggactacatagactccacttcgaccaccagcgacaatcatttccgcaagatgggcaacctgattgtgggtgacgagaacttcgaaaaaatgctgctacgcttcttttccggcgtggatcaatcgatttcgtcgttggatagtaatcgatatgctggcccaacggtgtgcaagctggtgctggaattgttcatctggctcgagctaaagtgcaatgtgaaggaaaagttgaaagagatcctgttgaaggttatactgcatctggtgcagtttggtggtgcaatttccagtcaacaaggtccaatcgatgcccaaagtcagctgatcaaggagctgttgtcgttttcgtacgataaaagtgacctcggggtggccatgagtataatcgagtgtgtatctcacttggtgtacaacaacatcgtcaacgtagagaaactgtactgctaccgagcttccgaaaacagccattccaacagtatgtatgcgacgcgcttcggcagtttgttcgctaccgtcctgggtccagaaaatgctcgccagtgtaaaaccgttaccgacagcacagtgttgatcgatctcctgaagcttgcctcgatcctcgttaacacgaagaatccacgctctggtgagagcgataatgcagcagcgtacgaaagctcgacctttaatgagctgaacacttccaacgaaagccaaacggacgaaatcaaagccgaacagcagaacattgaacctagaccaaaaactccgtgctttgcagatacggtcctacagcactcgccaacgatgacccgcctgttgagcactctttcgcactgttccacttcttcgtttgcaatgctagtggcgtcgtccatgtactgcgcctctattaacgattcgaaaagtagcagcctaaccgaaccgcaaaccgttgctgatgccgtgtttcaactgctgctatacatttgccgagcagcaacacaaaccgtcctggtggtgaaaccgctgttcgattacattagcaacgcctctagtatgcgacacgcaatgcccaagctgcacctatccgagccgttcctgtggttcatcttgaaggtgctggacaactctgcctccattgccatattcaccgacatgggcggcattaaggtactctgtgagagcctggtacgaagcaatcgggttctcatcaatacccaaccaagcttggtatcgatgatcatgcaacgactgtccaagtcgtccaatctacaaaccaccctgtccagttcgtccaagaaaagttcaatggccgcgacgcggaacgaagacggcctgatcaactttgccccatactgtaccatttcatccgaaaaccaaaccgcccaacctgctgacgtcctcatccaagcaccaatcgcatcgcaccgccgggctcggaatccagcctggagctacctcttctatcccaacgaatcgcacgtggatctgacgatcacactgcctacggctgtgctcctgaaagaagttcaactacaaccccacctgtccactcttgcctcctgtccttcggcggttgcgatagaaatcacgcgcgacagtaatctagggccgattccgatcacccagccgatctccaccgtcggtatgacctgcatccggttgaagttcgcccagccggaaattgccaccagcgtgattatccgcctgtaccgaccccgcgatgccaccaatataggtctgacgcagatatcggttctcggaacgacgacctttagcgatgtgaacggtagctctgtggctggaccatgttgggttactggaacaacgccgccacaacctgcgaaacctgcatcggatggtacgagcgagttcttcaatgatgacgacaaagctgccaaaaccagcctcggttggttgcggatccttgcccagtgttccagcgtggtaatgtacaataccgatcgacagctcgctaaccgggtgatcatggcagcgacagaagttccaggtttcttggaagcatgctgttcgttgttgaacattgctccactttgtccgaacattgccctgaacaatttggagacagtgctgcttaagataggactgtacagtagggagtgtggtttgaatctgatcaacatcctgctgaaggaaagtatcccacaaacgttccaactgtgcaatgattcgatctcggatttgctgtaccatctctgcactacccacaacgagtacacgggtgatcgagtggaagcaatgttgtcgtgggttcagcgattgtacgaacgctaccatcagaaccaagtcaacagatttgtactgcacgctaccaatccgtacagtggattcattcggtgtctgtcgtcgattctgtggcaatcgtacgcaaccgatctcataccggatctgccaaacatgatcaccaaggaattgtttgaaacgctctacgattggaatcaggaattggaacatgacgaaccgttgaagaaagcgatcgatgccatgctgtgttcggtgtgctgcattcgaccggaactgtttacgatgctgttgaagcgcatgggtgtgctagttcctaatttgtctaccgatcttacagcatcgatctccgatgataggaaggatggagaatgtatcacggacgacatcaagcaggaagaatcggacgcggcggaatggtacagccatttggtgattgaagatttgagcaggttgaatttgtccaaagctcacttgtccacaatttcgatggcctgccagtcgccacttgccgtgcaacagctgattgattccggactgcctaatctgttgacatcggtcattttggagttctgccaccgggcgttgaatagcatcaatcaacaccaaaaacagtcggaggtggccagtggcagcgttgagcgcgataaccgcgaagtcttcgaagaggaacaagctgccgcagcagcggttgctgctgccactgccggagatggcgctgaggagtccagctcatgcatgaccgacgccgacaaggagcatcataagtattctggttccggagccaaggaggtcatctatcccatggtcaacgttcaaaaagtaacggaaatccttggattcttctcggaagtctgctcggaaggtcatatgcgcgactggctgggttgtttcgagggctcgatcttctgggaacctctgcttctgctgctgtgcaacaacaaattagcaaatatttctccggaggtgacaccccaagcgtgtctcgatctggaagaatgccttatcaagttcctgtccaaagttacatcgtgtcacccgaaaaatcaagaagttttcaccgttaacctgatttccgtgattcgaaagtctgattccgctaatgttagcagcagtggtgcttccgctgcaaatggcagcagctcgaaccagactggactcaacaatcgaccaaacagcggtagcaaatcatgcatatccggattcacgaggcgattagtgctacaaattttactggagagcgagaaaatcatggtcgctgtccaaagcgaacttccgcttcagaacaaagatcccaatccgtacaatctgagcaaccatccgtcgaaacggccgaacactcacttccggttgttctacctgagcaccaactccaaatgtcaggaaattatggaccattgtgtgacggcgtacaacaggatcatccccaacttgccatccgacagccgggtgagtgaggttctgatcggttcgtccaatgccggtgcggctgcaggcggcagcgacaaccggaaggaactgtgggaaatgggtctcggtatggagttcctcagtgtggcggctggcgtaacggccaaggataagcggctgaaggaggccaagaatcaggccaccaccatgaagcagaaggacatcctgtccatgttcaaaatgaaaattgatgatcccaagctaaccgccccggacggaataatcctccgacatacagccattcccaatggagtgatcacaagtgataccaccatctcgcaagttctagccatgttgaaatcgtcaggaatatctctttccacaccctgtataaatcttaatctgagccttgccaaaaacaaaccggacgtggagctgagctgcgaagccagcagctcttcgtcttcctcgccaatcctgaaggcggccgacttcataccgctgtcttcgccgctgcagatcttctccagccgcggtggcctttcgctgctggcgcactacttgccgatggtatatccggaatcgcccaaatcgcagcaacagctgggcgacaaggacaagagtccccccgggggcgactgggtgaaggtcgagcagaacgaggagatctacgaagatttggacgacattctggcggatgcttcgcccaaagcgcaagccatctcggccgtaccgcagcactcgttggctgcgtttgcattgttcctaaagctgcctgcctactccgaggtcctcctgcgggacaaggttcgagcccagtgtctactgcggttgatcctgggcgttaccggagacggcgaaggcaacgagatctacagtctggccctctcatcttcactgccaactctaccgttcgaagtgttccgacagctgctggatagttcaccattgaccacggacgatggcgtgctgctgcgaaggatggtcatcgaggtcggagccatccatctggtgttgaactgcttgagcatcttcacgcaccataacaatgcgggcgtgagcagcaattctaactcatcggataatatccaggccgctgccagcaataaaggagcgccaggtgccgctgccaacggtaccgacgatcagctaaactcagacgacaaaagccatatgtattgggcgaagggaacgggcttcggtaccggttcgacccaacagtcgtggaatgttgagcaggctctgcttcgtcagaagagcgaagaggaacatgttaccgtgttgcttcaggttctctcgagctacatcaatccaggcgacaagttcccttccaacttggatagcgaggtgctcagctaccgagaatgcagtgagacgttaccggagttgccgccgatcttcctcgatctgttgcagcagtcatgcatgattccagcgctgagttcctacctgaggaacgattccgtattggacatcacgcgtcacattccgctgtaccgggcgatcttacaactgttgagggccatctcgctttcgaatcaacttgtgtcgttgctggtcaacaagaacaatgagggcaagatttcgatcgcggcgctgctggccaacatgaaggcttgcgtggacacctatgcgagtcgtttgaaggttaacaaaaagtccaatctgaagggccaaacgcagaagataacggtcagcttggacgacggagacgacgagggtttggcactgttgattccggacatccaggagacgtcgctgctagtccaaaatgccaccaacgtggaagcgttgaccgtggaggaggaactgaaggaagtcgtaccgcgaccgatggccaaatcggtcgaggagaagtatatggaactgatgaaagcattgcaatttgatacctttgaaatgattgcggaaacggataacggttaccgctttaccatttcgcaccatttcgaaacgaacgtccgtatggccggcgaccgtggccacccggggcgggtgaaacggctggcccaagagacggtcaccctgtccactagtttgccactgtcctacagtagttctgtgtttgtgcgctgtgataccgataggttagatataatgaaagtattaatcaccggaccggctgagacgccgtacgccaacggttgcttcgagttcgatgtgtacttcccgcccgactatccgaactcgccgatgatgatcaacctggagacgaccggcaggaacacggtccgcttcaatccgaatttgtacaacgatggtaaggtgtgcttatcggtgctgaacacatggcatggtcgacccgaagagaagtggaatgcacatacgtcgagtttcctgcaggttctagtctcaattcaaagtctcatcctagttccggagccatactttaacgagccaggatttgagcgaagccgtggcacgccgactggatcgcacagttcgcgggagtacaacagcaacatctatcaggcctgtgtgcgatatgcaatgctggagcagctgaaaaatccttgtccatgcttcaaagaagtcatccacactcacttctggttgaaacggaacgaaatctgtgcacaaatcgaagactggatagcggagctgagtaaaccgctgctaaacgagcgtaccgggcgaacgatttccttcaacgcgatggtactccggcggcagtatcgccagctgcgggaggaatttgccaaattgaagccaccggaggggctagacgagagagactatccgttcatcacgggcatcactccgaccacaccctcagtcccggtttgtgcgggtgtggaaggctcgaacaatggtgccgtagattcgtcggccaccacgtcaccagaaaagcccctaacttcggatgacgacgaaagtgaactgctgctgcaatccagtcagggtgatatcgtgatgggcgaagacgaggacgacgacgacgcaaacgttgtcgacgaagtgatcatcaaggctgatgtagaggatgttgctgctggcagtagcagcagtagcaacgacaaagggaccagcattccggacgatgggcaggacgaaaatccggatctgtcccctgaagagattgtcctctcgatggtgtggtaa

SEQ ID NO: 1010 - DNA, 2109 bp, Aedes aegypti; identical to SEQ ID NO: 498

SEQ ID NO: 1011 - DNA, 873 bp, Aedes aegypti
tgtaaccgacaagggcaacatctgtgcaaagtgtctgggagatcaacaagttgatcctgagtggcagtcccttacgcgttgagcgttttcaagtgaacgtgattttcgaggaataggctgtgacggcgctttttattattatcggcgtaccgcaaaagatcgaaggacgatccgagttcagcctcaagtcgccgcatttacaggcgcaccgaagaaggtgttcatcgtaccatgttacaaacgagaatgaatccctaccacgtgatgacagcggcgctgctggttgccctgggtgtaatactgcaactgagctcgaccgaagcgtgcagttgtttgccggagcacgcacagacagcctactgcgatgccgagtatgtgattgtggcccaggtgctcagaaagtcgaaccgaaagcataacgacaataacgtttacaagatcgccatcaaaaaagaatacaagatgtcaccccgtgcacaaaaaatgctcaagcaaggaaagctcattacaccgtcaactgattccatgtgcggcatacagcttgaagtgaatcagctttatgcgattgccgccagagacattcacgttggcctgtgcaactttgtgcgcaagtacagcgatcttacgattgtggaaaagcgtggcctggctggtatctaccgtaaaggatgttcgtgtcagatcaagccttgcttcagcggcgagtgtaatatgacgatcggggcctgcaattggacaccgtgggcttcctgtgagacagattacggatcgtgcattccaacgcgaggatatctgattgatggatcaccggccaaatgccactggcgtcgatcaccactctatcaaaagtgtaaagtggacacaagagaatga

SEQ ID NO: 1012 - DNA, 1843 bp, Aedes aegypti
gcatttcataccaactagacatatacgtaaccaagcaacttgacgatggcctgctacgatgtcgaacgcaaacagtggcggggcaaaacgcaaccaagtattctcaatccggaggccaatattgggcaaattgtgtggaatctactgtcgagaactccggacaaggttatccaaatcgatgccgatcgcgatagtcacatgacttgcgccgaaatgcgacgccgcattgtgcgagttgcgatgaatttacgacagcaagggtgccgtcgaggtgatatagtttcgctggtttgcaccaatagcgagaatgtggtaccggtttacatgggctgccttacaatcggactggtggtcaatcccttagcgccgatattcaacaaggatgacttggcacacatgatgcgacagactcagtccaaagttgtgttctgcgacgcagaaaatcgagaaactgttgaacaggccgctgaggacgcgatcgctgaaaaaccgatgatctatgtgatgggcgaaagtgctggagaagcgctgtccatcgatgggctcttaaggccggcgaaaggtgaagaacagttcgtccctaaatatctaggcgactccaagaaactgctggctatcattctgtgctcatctggtactaccggacttcccaagggcgtttgtctgtcacacgcccatctgatagagaacgatgtgtttgcagaagaactcaacgctggacccatattcaacttcagtgcactattctgggcaacggggatgtttgctgtgctcacctctctgtacaatcagcggcctcgagtgatcaccagcaaagcgttcaacgaggaaacgctgatcgacgtgatcgagaagtacaaagtggtagatgttttcacccctccgtcctacgttgcagccctggtgaatcatcctcgctttgccaaggccgacttcagtagtgtcaagaggtggacaatgggcggcgccatcgtatccgaggaattgcaaaccaagctggagaatcgtctacccaacgggatcgccaaatctgtctacggaacttcggaaatcggaatcgtaacggcggccgatactcctgtcgtccccggagcggttggaactatcatttcaaacttggaagtgaagatagtggacgagtgcgatcgaagattaggtcccatggaaaaaggggaaattcggttgaaattcaagcacaagattttggtaagtgtctagtcatgctgagtttgcagaagataactgaaattatcttatcgtagggctacctcaataacgagcaagcaactctggaagcattcgacgaggaagatttcttcaaatccggtgatattggatattttgatcagagtggccaactgtacgtggtcgaccggatcaaggacatcatcaagtataaaaattatcaaatttctccgtcggacctcgagtccgtcatcgaaaaaatcgaaggagttagccatgtttgcgtaacgggtgtgccagtggaggataaatcatccgatttggcaacggctgttatcgtacgcaaggaaggctcgacactgaccgaagagcaggtcctgcaagcggtcaacagccaagtgagtgacttcaagcagttgcgaggtggagtatattttgtggaaagattgcccacttcggctgcagggaaagttctcaggcgtgccgtgaaggagatggtgatcaatagactaagcatcaaatgatagttagcgacaataaatgaatgtttatactcaaatgcaaaaatatatcaacgcatttataagataaagtaaataaagatagatagaatagtgtatagatagtacataaattatattattcatggtgatttctt

SEQ ID NO: 1013 - DNA, 1743 bp, Aedes aegypti
atgattgaccggaatgtttacatcacctacaatgacacaggatgcgtcgactccatgtcccatgcatattccgtcaatcattgccatgaaacgcgtcacatcaccgcctccaccttagaagatgtcccgatcatcatcggcagcgaggagttccgcaccaacaacgtacggcatcaggtgatgccgcacaaccacagcaaacagatcgccaaattctactgggccgacaagaagctcgtggagaaagccatcaagactgccaccgaaacgcaggtcaaatgggaccggacaccgatcagcgagcggatcaagatctggcagaaggcggccgacctgatggccgggccctatcgggcagaactgaacgccgccaccatgctcggccaggccaagactgtgatccaggcggaaatcgactctgccgcggagttgatagatttcattagaatgaacaccgtctatctgaaggaagccaccaaatatcagccgatcagcgaaaacagtaaggtgacgaagaactcgttacgattccgtggcatcgatggattcatcgcggccgtcagtccgttcaactttaccgccatcggtggaaatttagcttatactcctgctttgatgggcaatggagtcctgtggaaaccgtcggacacggctctcctctcgaactacgtcatcttcaagatcatgcgtgaggccggtgtcccacctggtgtggtcaatttcattccaaccgacggtcccgtctttggtgacaccatcaccgcctccccccatctggctggtatcaactttaccggctccgtacccaccttcaaccggctatggcgtcaggttggagagaacatcaatatctacaacaacttcccacgactgattggcgaatgcggtggcaagaactaccacttcgtgcatccgtcggcggatgtgcaatcggtcgtgaacggaaccatccggtcgtcgttcgaattctgcggccagaagtgctcagcttgctcgcgtatgtatgtcccagaatcgctgtggccgcaggttaaggaaggtctgataaagacccgggatacgctgaagatcggggatgttacggacttctccaccttcacttcggcggtgatcgacgataaggcatttaatcgaatcaagtcgtacatcgaccacgccaagagctcaaagaacctggaaatcattgccggtggtaagtgtgatgacagcaagggatacttcatcgaaccgacgatcgtgcagtcgaacgacccgaaggataaaatcatgactgaggaaatcttcggcccggtgctgagcatctacgtgtacaaagacaaggatctggaccagaccatgaagctggtgggcaactcaacgaggttcgccttgacgggtgccgtgttctccaaggatgaagcattcctgaagcgtgcattggaggaattcaaacttacggccggtaatttctatctcaacgacaagtctactggatccgtggttggacagcagccgtttggcggtggtcgaatgtcagagctggattttgctctcagccgaaagatgtgtggtccacggacgactgttcggagcacgttgtggttggcgggggaagcggtcgatctactggaagagctggattctgctttcagacaaaggatgtgcggtccacggatgaatcagaaggctagattctcctctcggttggcgggaaggcggtcgatgcgcctctggaagagctggattctgctttcagccgaataa

SEQ ID NO: 1014 - DNA, 1179 bp, Aedes aegypti; identical to SEQ ID NO: 496

SEQ ID NO: 1015 - DNA, 996 bp, Aedes aegypti
atgtccgtgaaagctaagctgatgaaggaaatcgccgagccgatggccacctctggaaacaaggtcaccatcgtcggtatcggccaagtcggtatggcatgtgcctttagtatcttgacccagagcgtgtccagcgaggtggctctgatcgatgtcaacgccgataaactgaagggagagatgttggatctgcagcacggttcggccttcatgaagaacgcccaaatcaatgccagcacagacttcgccgtctcggccggatcacgcctgatcgtcatcactgccggtgttcgccaaaaggaaggcgaaagccgtctgaacctggtccagcgcaactgcgacatcctgaagggcatcattcccaagctcgttgaactgagcccagactgtatcctgttggtcgtttccaacccggtcgatatcctcacctacgtggcctggaagctctccggcctgcccaagaaccgtgtcatcggttccggaaccaacctggattcgtctcggttccgtttcctcatgtctcagcgactgggagttgccccaacctcgtgccacggctggattatcggtgagcatggtgacagttcggttccagtttggtctggcgtcaacgttgctggcgtgcgcctctcagaactcaacccgtccattggcaccgccgatgatgaggaaaagtggggcgaactacactacgaagtcgtcaacagtgcctacgaagtcatccggctgaaggggtacacttcctgggctattggtttgagcgttgcttcgctggcctcggctctgctcagaaatacttacaacgttcatgccgtttccactttggttaacggcgagcaaggaatcaccgacgaggtgtacctatcactgccatgcgtcctcggcaggaacggcgtcacgcacgtcgtcaagcagattttgactgaagctgaaaccaagaagctgcaggaatcggcccgcatcatggccgaagttcaggccggaatcaagttttaa

SEQ ID NO: 1016 - DNA, 1258 bp, Aedes aegypti
gatagaaaaccataattgcttacaggatgttttaagtagaatattcttcaattcataactattttacggtaaatattgtggtaactacacaaaagatgtttattctgatagtgttttctgtgcttatttgtacgtttcaaacctgtttctccgaaattggatgtcgcgatgagaacaaccagttagtggattggtactatctatataaattgccagaagcagctgcagatcagcattcgccgaaggacgtaacatcaggattacattacgcgtttattacatcgcacggtcctaatggttggcgagtgtccgagaaaaatgtgaaccaaagcgagagcattcctggaagaactttgaagcccttgctgaatggtgacgaagatttgttgaaaattctttacaacgatgaacctccgagaggcgaaacggacggttccagggggcacaccaaaggagtcgttgctaccgatggtagcactggattttggttgattcattcagttccaaaatttccaccgatgttgaatgagtcgtatcattatcctgatacaggtaaaatctacggccaaagctttctatgcgtgagtgtacgagcagaccagatggaaaccattggacaacagttgatcatgaacgaaccgcacgtttattcgttccatgttccggaagctttgaaggaacgattccccaaattagtccaggcaacggaaatgaaaccaatcaagaagccgccatactggagtgcagtcaatttgaaatccgttggtggaataaacttccattccttcgccaaaagtcgtcagttcaagaaagagctgtactcggactttatagcgccatcgttgcaagtagatttgctggtcgaaacttggcagcatggggccggaaatctgccaagcgactgtacgacctcacagtggaaggtgatgaatgtgaagggagtcaaggtgaccgaaaagtatcaatttaccaccctgaaggatcactcgaagtgggcggtttcagtgccaggagaccgagacttcatctgtgttggggacatcaatcgacaggagcatcagaaagcacgaggtggcggaagtgtctgcagtcagatagatgggattgtccaaacctatcgcgtgatggtggagaacattgaaagttgtccgaagaaatgaataattgaatcaaattatagataccaggtgaactaaaaatttgtatgatctcattttgaaattaaattttgaattataataaaatacttttacatttt

SEQ ID NO: 1017 - DNA, 1597 bp, Aedes aegypti
gatttaagttatgaagtatgttgcgttggtctgtttgctgctgaccgtgggctttgccaacggacagaggacttttccggatgatttcatgtttggcgttggaacgtccgcgtatcagattgaaggtgcttgggatgaagacggtaaaggtgagtccatctgggatcatctggtgcacaaccatcccgaaaagattgccgatcgttccaatggcgacgtagcttgtgatagctatcatctgtggcgacgagatgtgcaaatgcttaaagacttgggagttgacatctaccggttttcgattgcatggacacgtatcatgcctaccggtatcagtaaccagattaacatgaaaggtgtggaatactacaacaatctcatcaatgctctactggaaaatgacatcacaccatttgtggtgttataccactgggatctaccgcaaagactacaggagatgggaggctggacgaatcgcgaagtcataggccattttcgagaatacgctcgatttgcattcgaaacattcggcgatcgtgttaaatggtggacaacttttaacgagccattgcaaacctgcagacagtcttatgagtgggatgcaatggctccagggcttgatttccccggcattcctagttatctctgcactcatcatgtactgctttcccatgcagaagctgccgcagtataccgaaaacagtttcaatcaagtcaaggtgggaaaatcggtataaccatcgattcttcctgggcggagcccaatagtaattcgtcagatgatttggaagcctcagacatcaatctgcgattcttccttggatggttcgcaaaccctatcttctctgccgaaggcaactacccacaagtgatgatcgatcgcattggtaacttcagtgcatcacaaggtttcgtcaagtctcgtctaccagtgtttacacaggaggaaatcaacatgctcaaaggatctgcagatttcttcggattcaacacatacactgcgtacaaagtttacaagaatgatgctgcaaatttggcaaactttccagaaccatcatatgatcatgatcgcggtatcgtagaataccaggaccccaattggccagaaaccggttcatcctggttccgattgtatccgaggggaatctacaagctgttgaaatggatcaacaaggagtacaataatccactggtcttcgtaactgaaaatggttacagcgatcttggtggaacccgtgatgaaaagcgtgttaagttcttcaaagatcacttgaactccgtgctggatgctgttgcggaaggatgcaatgttaagggctacgttgcctggagtttgatggacaactttgaatggcgagctgggctgtcagagagatttggtttgtactttgtggactacaatcatccaaatctgactcgagttcagaaatcttcggccaaattctacgcgaatgtaatagaaacacgctcgattaatatgaccttgatgccagaaccggaggagtatactttgtatgaacgcggaactagttcgacgatagttcctacaatttatattattttagctggtgtgatgctgattttgagacagttgtgttag

SEQ ID NO: 1018 - DNA, 1946 bp, Aedes aegypti
cgtcttttgtgtgtggtgtcgtttgaaagccgaaatcgtatagtgctgcaagatgtccaacaaggtgctattatccgaagactctgtctaccagcagatccagcaatattataaagagcatggtgcttcgattaacattaagaagattttccaagaggacgatattcgtttcgataagttcagcctaaaactgaacacgcctaaggatggggaaattttgctggattactccaagaaccgtatcaccgacgaggcctggaacatgctgctggagctggccgaatcgcgagatgtggtcaaaacccgtaacgatatgttcaacggcgaacgtatcaatatcaccgagaaccgagcggtgctgcatattgcgctgagaaatcgttcaaataaaccgatcatggttgatggtaaggatgtaatgcctgaagtcaatggcgttctggagcacatgaaggagtttaccgaacaggttctgaatggagtatggcgcggctataccaataagaaaatcagcgatgtggtcaacatcggtatcggtggttcggatttgggtccactgatggtctcggaggctctgaaggcctacaacaccggtattcgttctcatttcgtatccaacgtcgatggtactcatattgcggaaaccttgaagaagctggacccagaaacgactctgttcattattgcttctaagacgtttaccactcaggaaaccatcaccaatgccactgccgccaagcggtggttcttggagcgctgcggtgagcaggagcatgtggccaaacactttgtcgccctgtccaccaataaggagaaggtcgctgccttcggcatcaacaccaagaacatgttcgaattctgggactgggttggtggacgttactcgctctggtccgccatcggactgtccatttcgctggccatcggattcgacaacttcgaaaagctgctggacggtgcccactacatggacaaccatttcctgaatgctcctttgaatgaaaatgctccggtcattttggccctgatgggcatttggtactcgaatttctacggagcggagacacacgccctactgccctacgatcagtatttgcaccgctttgccgcctacttccagcagggcgatatggaaagtaacggcaagggtgtgaccaaggccggaaagcgagtgaacttcaacaccggtccaatcgtgtggggagaacccggtaccaacggacagcatgcgttctaccagctgattcatcagggcacccgtctgattccgtgtgacttcatcgcaccggtcttcacccacaacccggtggagaatggtggcatgcataagattctgctggccaactatctcgcccagacggaagcgttgatgatgggcaaaaccgaagagcaggcccgtgccgagttggaaagtgctggcatgtccggcgaaaagctagaacagctactgccgcacaaggtcttcaccggaaaccgcccgaccaattcgatcctagtgaaaaagatcacgccattcgtgctgggagcgctgattgccatgtacgaacacaagatcttcacccagggtgtcatctgggacgtgaactcgttcgaccagtggggcgtcgagctgggcaaacaactggccaaggccatcgaagtcgatctgaatgattcgaacaagactacctcgcacgattcgtccaccaacggattgatcaacttcatcaaggtccactgggaacaggatggaatctaagcatgttatctcaaacgaagtaagaaaaagtacacatattatggttaatgttatcgaatatataaataaaacttaaattattcttggacgtacgttcgtttaaatatagttgattgaaattactaaacgtagcacagcattgcaactctaattggcggaaacttaaaaacagatgctttctataataaagatgaaacaaacatgtttg

SEQ ID NO: 1019 - DNA, 1988 bp, Aedes aegypti
ctaccgttgggtccggtcataacacaaagtaacttgtttccgacccaattttctatctcacttttttcactttctgatacttatacgatttttattaccatgaattaatgtagcacgtcatactgacttcaaattttaaactagtcggggataaatgaaaaaaaaatgccattttagttttgatttttcatacttgttttattttttctttttccttaacaataaacaagatttttaacccaaggctagttcatctcttggtcccgagattaaaagattgggttaaaaatctcgtttattattaagaaaacttcccttccgaagtaagtcgtcattataactcttacgccatattgataggagagaaactaatcaaggaaattatttcccgtcgtatatgatttattgaaaaatacgatttcaaaaccaaaaaacagttttattctatttcaatttattgtttccatcatgcagttcagtgtataagattgaagtatctatttaatttaatttaaaaaataacttgcatatactcaattgagcattcattatgtatacgacacatttgcgtataacgataagttaaaaataggtacacataacaaagtccatactcgttatcattttcctttatgcaagcaacagttttgtcagtctcacaccttgctacactgaaaggctatggtttcatcattattcccattttttataagttattaatgattcaggaacatattttaggaacacaatgaagtatttagggtggcaaaaataaatatttattaggtgatatttagcttttgtttgtgaataaattggcacaatcaagtcatttattaacacatacgaagatagccatcggaacatgttactgctaggtttttcaataatgatgcgatctggactggttagcactcggcgttactgcagttcctcagcgatcgctgccaagaagtggatttacgcaaaagtattcaaaggagaaccaacgcagcacaactttcaattggaggtggacaaattgccggctttgaaagatggagatatccttgcgcaggccgagtacatcagtgtcgatccgtacatgcgaccctatatgatggcttacccagccggatcgctcatgattggtggtcaagtgggaaaggtgatcgacagcaagaacgcttccttccccgtgggatcttcaatattcggccaatttggttggcgtacgcacaccgtctgcaatccagaaacgatgaagaaagatcaaccttacctactgcctagtttcggaaatttgcctaccagtttggctcttggcgtgctgggaatgccgggcaatacggcctattttggattgctggaattgtgctcgccaaagaagggagaaactgtggttgtaagtggtgcagcaggagctgtaggtaaccacgttggtcaaattgctaagaatctaggatgcagagtagttggaatcgccggatccgatgccaaatgccagtggttgaaggacctaggattcgatgaagctatcaattataagacagctaacatatttgctgaattgaagaaggctgccccaaaaggggtagacgtctattttgacaatgtaggcggtcaaatatccgaaacggttatcaaacaaatgaatttatatggaaggattgcagtttgtggaaccatatccaattataacactgcaatcgaaaaggtttcggacccattgagacagatggtctttaagcaactgaaaatggaaggattcgtggtatggcgctggaacgataggtggatggaaggaattgaggccaacttgaagtggataaacgagggtaaactgaaatggcacgaaaccgtaacggaaggcttcgaaaatttaccaatggcatttattgacatgttgaagggaggcaacactggtaaggcggttgtgaaaattatttaacttttttttttgaatgttatattctaaataaaccttcaaaatatattaataagcgact

SEQ ID NO: 1020 - DNA, 1639 bp, Aedes aegypti
ttgtattaggacagcactttgaagaggatcggatttatgttatgaagtgttttgcgttggtctgtttgctgctgctgaccgtgggctttgccaacggacagaggacttttccggatgacttcatgtttggcgttggaacgtctgcgtatcagattgaaggcgcatgggatgaagacggtaaaggtgaatctatctgggatcatctggtgcacaaccatcccgaaaagattgccgatcgttccaatggcgacgtcgcttgcgatagctatcatctgtggcgacgagatgtgcaaatgcttaaagatctaggcgttgacatctaccggttttcgattgcatggacacgtatcatgcctaccggtatcagtaaccagattaacatgaaaggtgtggaatactacaacaatctcatcaatgctctactggaaaatgacatcacaccatttgtggtgttataccactgggatctacctcaaagactacaggaaatgggaggctggacgaatcgcgaagtcataggccattttcgagaatacgctcgatttgcattcgaaacattcggcgatcgtgttaaatggtggacaacttttaacgaaccattgcaaacctgcagacagtcttatgagtgggatgcaatggctccagggctcgattttcccggcattcctagttatctctgcactcatcatgtactgctttcccatgcagaagctgccgcagtttaccgacaacagttccaaccaagtcaagggggtaaaatcggtataaccatcgattcttcatgggcagagcccaacagtagttcatcggatgatttggaagcttcggatatcaatttgcgattcttccttgggtggttcgcaaatcctatcttctccgccgaaggcaactacccacaagtgatgatcgatcgcattggtaacttcagtgcctcgcaaggtttcgtcaagtctcgtctaccagcgtttacacaagaggaagtcaacaagctcaaaggctcggcagatttcttcggattcaacacctacactgcgtacaaagtttacaaaaatgatgctgctaatttggcaaactttccagtaccatcatatgatcatgatcgcggtatcgtagaatatcaggatcccaattggccagaaaccggttcaacctggttccgattgtatccaaggggaatctacaagctgttgaaatggattaacaaagagtacaataatccactggtgttcgttaccgaaaatggttacagcgatcttggtggaacccgtgatgaaaaacgtgttaagttcttcaaagatcacttgaactccgtgctggatgctgttgcggaaggatgcaatgttaagggctacgttgcgtggagtttgatggacaactttgaatggcgagctgggctatcagagagatttggtttgtactttgtggactacaatcatccaaatctgactcgagttcagaaatcttcggccaaattctacgctaatgtgatagcaacacgctcgattaatatgaccttgatgccagaaccggaggagtatactttgtatgagcgcggaactagttcgacgatagttcctacaatttatattattttagctggtgtgatgctgattttgagacagttgtgttagaaaagact

SEQ ID NO: 1021 - DNA, 1910 bp, Aedes aegypti
cggaacggtaaagtggacagcgcttagtttcctgtattaacaaaatgttcagaacgggagtgcaacttgtatccaaaactggctgcagtttggctcaaaactcaagatgtctttccatcacatcgactaatctgaagcgggcacaatcacccgctaacatgtctttcatggcgaacctgtttcgaggagaaattcagacttcccaagtgttcccttacccggaagcagtcgatcaagagcaaagggagtacattcaatccttgacggatcccgtacatcgattcttcgctgaacgctacgacgcggcagaaagtgaaaagctgaatggcccctcggaaagcgtaacggacgctctgtgggaaatgggatattacggcctgatggctcctgaagagtacggaggactaaacctttccaacaccggttacgcaaccatgggagacgcagttggagcagtagatctaggtttagcggtagttctaggagcgcatcaaagtatcggatggaaagggattctgctgtacggtaccgaagagcagaagcgtaaatatctgccgatggttgtgagcggtaaaacgacagctgctttcgccttaacggaacccagctctggttcggacgccggatccatcagaagcaaagctgttaaaagtccttgcggcaagttctacacgctaaatggatccaagttatggattacgggtggtggaatagccaatgtgttcacggtttttgcacaaactgaggttacagacccccgcacaggacaaaagagggacaaggtaactgggttcatcgttgagcgtgacttcggtggtttgacgagtggacctgcggaggacaagatgggtattcgttgttcgaacaccacagaagttttcttcgacgatgtgaaagttccggttgaaaacgtactcggaggagaaggcaacgggtttaaggttgcaatgaacattctgaacaacggaagatttggaatggctgctaccctagctggaacaatgcgagcttgtatagctaaggcgactgaccatgcaaactctcgggttcaattcggaaagaaaatcaaagaattcggaaacgtccaggaaaaattggctcgaatggcaatgttgcagtatgtgacacaaacaatggcctatatggttgctggaaatatggatacaggttcaaaggattaccacttggaagctgcgatttccaaagtattctcgtcggaagcagcgtggcacgtttgcgatgaagccattcaaattttgggcggaaacggattcatgaaatcggctgggcttgagaaaatattgcgggacattagaatctacaagatcttcgaaggagccaacgatgtgttacgactgtttgtagcgttaaccggaattcagtatgctggatcacatttgaaagaaatccagcgagcgttcaagaacccgacggccaacttgggattgatatttaaggaaggttctcgaagggcagcccgaagcatgggagtaggtggatccgacttgagccaatttgttgctgagccattgaaggattcggcaaaacagtgctctgagagcatagacatgttttcgttggcagttgaatcattgctcattaagtacggcaaacggatcgttgatgaacagtttttgttgactcgtttggctgacagtgccatcgatatctatgctatggcaactgtactgtcacgtgcatcccgggcattgaacaaaaatctaccctccgcagagcacgagatgatgatgacgaaggcttggtgtgttgaggcaaacaacagagtcaataacaatctgaagcgagtgaacaagcatctgcacttggagagttataaaacgctgtctctcatagcaaacaatatctgtgagaacggaggtgtagtgcaaaaactgcccttcgaaatctaa

SEQ ID NO: 1022 - DNA, 1177 bp, Aedes aegypti
aggataccaagattatttacagctattatttacccattgacgggtactttcatgttagcgtctgtagttttgagtgaaaatttctcggatttcagtaaagcaaatggacagtgtttttttaacatatgtcacatttgatattgatgctaccgggcttgcattttttttgtttcgattaatcaaaattaacctaatcgctaatcacgagatcaagcagttgcattacatattttaaaatttcgtgtcctagttgaatgaaaagcacaatcgttgaagccctgtaagtaccgaatcgaggcgttttcgctgaataccattaaatttagtcaatgtcggattgtgtccagcttctttattgtgttgaactgtgattctcttacttcgtcacgttaagtagttagcgactatgttacaacttttaaggcaatttagtcgagtccagaaatgttcactcacaaaaatgtcgacatcagcagctgcagggaaaccgatagttccttcacaacacaacttggtttggattgacctggaaatgaccggtttggaggtggaaaaggatcgtatcctggagatagcctgcgtaatcaccaataagaacttggaaatcctggaacgtggtccggatattgttatccacgagccggaagaggtgctgaacgcaatgaatgaatggtgccaaaccaatcatagcaaaacggggctgatccaggcggttcgtgaatcgaaaatcgatctgcagaaagctgagcaaatggtgctggatttcgtcaaaaagtattgcccggaaaaggcttgcccactggcgggaaatacaatttatatggacagaatgttcctgtatcgatatatgccgcagttgaacgaatatctgcactatcgcatcatagatgtgagcacggttaaagaactgtgcaaacgctggaatggggcagtctttagcaactgtccgccgaaaaagttggtgcaccgagcgctggacgacatcgaggaaagcatacaggagttaaaatactacaaagattatatgtttaaaaaatagttttagcttagctagggattacagggtctctaagacagaaagaatattagacttatagcttttgattcgactttcgagtaactaaataattgtaaagctttacatattgaataaattgtgaagaaagattattacttt

SEQ ID NO: 1023 - DNA, 1155 bp, Aedes aegypti
gaagaaaccgattgccaacatttctccaaagtagtctcccgagtcggatcagttagataatattaaattacgtcgtgtgcacacgatttttttatatttgtccgtcatttgaaaattaattattcaaagtcatgaattttgaacaacaagtggttttgattactggagcatcttctggaattggagaagcaacagcaaagtatctatccaatttaggagcatcgttagttcttactgggcgtaattcagagcatctcacaagagtcggagaagcatgcgaagcgatttcaaaaaccactccattgttactgattgctgacgtcactaatatagatgataacaagagagttatcgatgaaactatcgctaaatatggaaaactggatgtacttattaataatgctggcatactgtcaaacggatcaattgaaaacaccagtctccaacaatatgatgaaataatgaatacaaacgttagagctgtttatcatttgacaatgctggcagtacctcatttaataaaaagcaaaggaaacatcgtaaatgtaagcagtgtagctggaaacaggtcctttcccggaatattagcttacggaatgtctaaggcagcaatcgatcaattcactcgctgtacggccttagaactagcccccaagcaggttcgcgtgaatgctgtaaatccgggtgtcatagtaactgatattcacaagcgaggaggaatggatgaagaaacgtatgcagagtttttggaaaaatgcaaacagactcatgcgttaggtcgtccaggcgaatcaatggaagttgcttcagtaatagcatttcttgcatctgatgctgctagttttataacaggagtgaatttaaatgtggatggtggacgtcacgctatgtgcccacggtgaacgtttttgaagaaaaacacacatctcaagaatttgttgttttatatttgtttactttgataattaatgtaatgttcttggacaggatcttgagatgttaatggataaaatatatgtataattatcgatcttacattattctaatgaatttcacatcttccattgttatgctgatcattatcagcattaggaaattcttcaaaactgaaaagggcaagttattgataaaagtgaagttagtactacgccgttt

SEQ ID NO: 1024 - DNA, 1032 bp, Aedes aegypti
atgagtgtgatagcgttcacatggttggttcttcaaattgcaatagttacgggagtgcgtccatgttcgtataacgagttttgtatcaacatcaggcagtgtccaacctataaacagtatgacaacgaaccgttccagaactggccgtcagatataaaaacgaaggccagggaagcgcactgtaacagcgaagtagttggcaaccagacgatcgtgagcatatgctgcccctcggtcatgaacagtgagacttgtggggctcagggagatgatcgtatttccaagggccaggtggcgcagccattttcgtatcgatggatggccctgctacagagcgataatggccggttcgagtgcggagggacgctcgtgagtagcagatacgtcctcacggctgcccattgccttaagcgggcaaggataatatcggtacggctaggagaaaacgatatcgacaaaatcgaagactgcataactgcggatggcgaaacaatatgtgcacctcctccacaggacatccttgtcgacaggaaagtcatacaccccaatcataccaataggtacaaactgaacgatattgctctgttgcgattggcaagtcccgccattttgggtcatagtgtcgcaacggtttgtctccccgatggaactccggagcagcggaagctaaaaccatggagctacattgtgacaggctggggaaagactgaaaacggaacttcgtcgagtgtgctgcgatttgcagatcttccctcggtgccgttagagacatgttccgtcatgattcgaaacatccattcgaccatcaggctggacgagagtcacgtttgtgctggtggtgtagacctgaaggatcactgcaagggggattccggaggtcctttgcattacgtttcgaacactacggcccgattcgtccagcagggtgtggttgcatttggtatcaggacttgcggagaggagagtaaaccaggcgtttataccaatgtagggcatttcatcagttggctggttcaacacgttgatgagtaa

SEQ ID NO: 1025 - DNA, 969 bp, Aedes aegypti
atggatcgttgggttcatcagctcggctcgtgtgtgagattacttgtgaagtatttgagtgcacattcaccctgcgtaaccattgatggattggatgggaaatgcgttccggtggatagctgccaatggatcctgtcaaaggcttccgtcgtgagtggcatctatgagcgaagtgaatgtggcactgcttccgattttacgcccttggtatgttgtcccaggtggcggaatgcagaaaactgtggtcagggcgtaaccgactcgtttccgtgggttgtcagcatagtttaccgtgtgaaatggaagattttttcacagaggtgtacaggatctttgattaatagccaatacgcactgacagtagcgcactgcattgcagacttttcattctattggaaaccttacagcgttcgagtgaatagagataccacctacaaggactacgcaatactccgcagcatagttcacccaagctacaaccgattcaacctcaacaaagatcacgatgtgtcccttctgaagctggttgataaagtcgttttcgacgattatgttcaacccatttgcttgacgcgagaaagagatcagcacagtacactgtatgagggccaaatgttaaccattttttcaaggggtccaacagaagcaggtcaaatatccagccaaaaacatccaattgccatcccattgcgaaatgcatcaatttgcaagaaaatctataaagaaattcgaattgaactgtctcgatcgcagctgtgcgtaggtggtgaacccggaagggattcctgccgtggggattccggcggtccactgatgctacaggcaatagattctatgacccctcgctggtatcaagttggccttgtgagcttgggcccggaaaagtgcggcggaacgattcccggcatctacgtcaaactgctcgactatctcgaatggatcgaagcaaccgtggatgaagttgcctag

SEQ ID NO: 1026 - DNA, 1159 bp, Aedes aegypti
aaaacaaaatttgctaaaaagctgtcattctcataaaacgtgcgcgatcaaaacaaaacaaatttaaccggtagattttggtgctcgatttactgttcaaattttaattagattttcccgcaaatcccgacatgagtttcgccggacccaaagccgtgatcgaggagggagacacggtcattctgtacctcaccgtgacgaacgtgtacgccatagaagccgttccgcagatcaaaaacaagaagggagaatttgtggagtacgtgttccagaccaactttggcgccctgaaggtcaaggacattatcggggtccagtatggatcgaaggtagaactatccaaaggctgggcccacgttttgcagccgaatccggaactgtggacacaaaccctcccgcaccgtacccagattctgtacaccccggacatcagtatgatcctgtatcaactggaagtcaaacccggcagcgtggtgattgaatcgggaaccggttccggatcgttgtcacattacttcctacgagccatccgaccaagtggattcctgtacacgttcgacttccacgaggaacgggttcaaaaagcacacgacgagttcaaaagccacggtttgggcgacttcgttaaggtgacccagagggacgtttgcgagaagggtttcggtgaggaggttgacggaaaggcggatgccgtgttcttggatctgccggctcctcagttggcgattccgcatgcagtcaaggcgatgaaggaatcaggtggcagactttgctcgttctcaccgtgcatcgagcaatcgttgcgggtctgcgaggccctggagcagcacgggttcgtagatgtcgtcaatctggaagtgcttcaagtggaagacatcgttcgaacacggaacgtccccgtgatggatttggagtttctgaaacacaagaaaaccgacgtggactcgaaggatgccaaaacgccaaaggaaaccaagaaatatatcacctctagtgcaccgaattccatggccggacatacgggatacctgacggtcgccgagttgccaccgttgtttgcgcggtagttgtaggtttggtaaaggctatcgtttttttttttggttttaatttaaataaaaacgttttcaaacatgaaatctttgcctaataaatctta

SEQ ID NO: 1027 - DNA, 576 bp, Aedes aegypti
atggcgatgttttcaagaccatttgtattttttatttgctgtccaatacttcgaaactgtggccattgtggtgaaccagagcaggaaatagtaaaccgaattaccggtggcagtgacgtagagccgggatcccacccatgggcagctttgctagtctacactctaggcagaggagtcaccaaatcgctctgtggaggggcgttgatcaatcttcaaactgttttgaccgccgcgcattgtatcgaaggtcttcccagaaattggagaatgcatagggttcgcctaggcgaatggaatgtcgataaccttcacagttgtaagaacatagaaaatggagaaatatgcaatctagaaccggaagtacgacgtgccatattgcatgaccattataatcgactatcaaacagtcatctaaacgacattgcacttctacaattagcagagaaggtcacaataagcaaatacatcaaacctatttgtcttccactagacaaaactattcagctaatgcctatagaaaatgaaccatttactgtagtcggatggggagagactgagaacgcccaacacttctag

SEQ ID NO: 1028 - DNA, 1941 bp, Aedes aegypti
atggagcctcctggtggacttccaccggataaagatggacataagcttctccaacagcagcacagtctcacacagaatcagaaaaatcctcagtcacctccaccgaatacagcaacagcgacatctttgccacaacaatatgcactgcaactacaaactcaacaacaacagcttcaactggtaccccagcaactgcagttaacttcatcattttccgtgaacaatcaacaacaaccaaatgtttcactttcgaccagttcgttatccggatcattagccaataatcaaagcgccggaggaagttccagtgggacccccgcaacaaacgtccaaacaggaatagagcgcctttctcggcctatggcatttgataagatggaaggactggttcgtgaaatgcaagatcctgaatccggagttcctgtgcgtagtcaaaaacttttcctcacttcgattccatctgctttcatgggttacgatctcatcgaatggttgatggaacggttggttatcgaagaatcggaagcgctgaacataagcaatcaactttgtatgcatggctatttctttcccgtgtcagattccaaaacactagtcgttaaagatgattcctcgttgtatcgctttcaaacgccgtactattggccgtggcagcaaaaagcaccggataacatcgaatatgcaatctatttgacgaagcgatccctaagaaataagcaacggcatggactggaggattacgaagccgaagcaatggccagtttgcacaagaatctcaaaggcaagtgggatttcatcacaatgcaagcagaagagcaggtgcgattggctaaagagcggaagaagggcgataaaattgttggagactctcaggaacgagcgtattggagagttcatcgtccgcctccaggtcagtttactcctctggaaccgtgtccaattccatctcgtgatcgtcaaggaaaaccacgaaaacgaacggttgaagactggcagcgtgaagtggagattttgaaggcctctcttggacggaaccgtgtcaagatgtcccaagcgtgcgaaagcttagtgacgtatttcgaaacattcagcgagtacgatccaatgatgcagcctccgctaccttctaatccttgggtcaccgaagatgtgagcttttggcagatgaacaatccgttggttgacgtgccaactgagaagcgagttaagcgttggggtatttcaattgaagaggttgtgtctgatccaacaggactacaagagtttaccgcatatctgaaaaaggaatactcgcatgagaatatccgcttttggatggcggtgaatgacttgcggaggtcgtctcactcgcagatatcaagaaaagttagggatatttacgaggaatttctggaacctggtgccccttgcgaaatcaacatcgatggcaaaacaatggaaaaggtccatcagggtttgaaaaatccatctagatttgcttttgactctgctgccgagcatatctatatgctgttgctgaaaaaggattgctatccgcgttttgttcgctctgaacactacaaaacattaatggcgaacgcaattcaaccatcgcacaaaaagcgtttcttcggattcggaggtggagcaaagaagaaaggctcaacagcaactgctccaaatccttcgcttttgtctcagcccacctctcaagcaactggagctgtcaatagcctttctagaagacggggaagtgaccgaagtttgtctgggtctgctcatgagttagctgtctgtggagttaaggataatactaaagtgccacattctcatagccaaagcaatttgagcgatattccttacagtgtctcgatctacagaggtgatatgccttccggtggctttgtcggacatatgggaacagttgaacgtaacgacgaacagagaatcggacagcagtaa

SEQ ID NO: 1029 - DNA, 3024 bp, Aedes aegypti
atgttatcgccattgatgttaacccgtctttccctttttctccaatttctcgtttcagaacgtcccctcaacgaatacatatcccactacgaaaccctcagctacgaccacaaacatctgcatgctagtcacagtagggcgaaacgatcggtcaccaaagatcaccatgtatatcttaggtttaaggcgcacggaagagattttaacattaggctaagacgagatctcagtacatttagcgataagttagaaattcacaccgaaagcggtccaatccaggcggacacctcgcacctctaccagggggagctgctgggcgatccggacagtcacgtgttcggctcgatcatcgatggggtgttcgaagggaaggtgatatcctcgcgggacagctactatgtcgagcgggccaagcactacttccggaacagttccgatccggagacgcacccgttgcaccacggggtggacggccatgcggaaccgttccattcggtcatctacaacgagaagcacgtggatgacccgtaccggcagcggaggacaggccatccctccggatgtggtatcaacgacgaggtgtccctttggatggacagtgttcaaaactccgcgctggaaaatgatgccaccgatgaggaagtggcagatgatgacggtgcagaggaagacaacggtgccagcacggaggcgaccaagcaaagcaggcaaaccgccgccagcagtggagataataatgtgaataatttaaacggaaatttattccaaaaatcatcaactcagccaaactataataatgttaacggtagcagcggcggcagcagccagaactataataataattatcgtagaagtaattctaaagataatgtgaatactaattataacaaagccaacggcggcagcaatcggatcgagaccgggtatgagtttaaatatccgcacgagaagtactcgaaagcggccaactggatggctgccggggaacatccggaggaccgggagtggcaccagcggtcacacgaacgggtccggagggcaacacgacccaaagaggagaacaaaaacacctgctcgctgtacatccagacggatccgctgatttggcgtcacatccgggacagcatagccgatcacgaccgaggtcgcaaatcggaaattgatgagaaaactcgcgaggaaatcctctcgctaattgctcaccacgtaacggccgtcaactacatctaccggaataccaagttcgacgggcggatagaacatcgtaatattcgattcgaggtgcaaagaatcaaaatcgacgacgattcggcctgcaacgaaaattacaacggagagtccaacccgttctgcatggagaacatcgatgtgtcgaacttcctgaatctgcactcgctgggcaaccatgagattttctgcctggcctacgtgttcacctatcgagatttcaccggcggtaccctgggtctggcttgggtcgcatcggcatccggtgcttccggcggtatctgcgaaaagtacaagacctacacggaaacggtggccggtctgtaccaaagcaccaaacgttccttgaacacgggtatcatcacctttgtcaactacaacagccgggtccctccgaaggtgtcccaactgacgctggctcacgagattggccataatttcgggtcaccgcatgactacccggctgagtgccgtccgggaggtatcaacggcaattacatcatgttcgccagtgccacaagtggtgatcgaccgaacaatagcaaattctccacttgctccgtgcggaacatttcaaatgtgttggacgcgatcgaggacagtaagaagcgaaactgcttccaagcttcggagggtgcattctgcggcaataagattgtggaaatcggagaggaatgcgactgtgggttcaacgacgaagaatgcgccgacaagtgttgctatcctcgggtgattagcgaagtagatctgggactgaatgctacggcaaagggctgtacacgacgggccagaacgcaatgtagcccttcacagggaccgtgctgtgatagcaatagttgcaagttcgtctcgagcttctccaacgtgacctgtaaggaagaaaccgagtgttcctggagctcaacttgcaacggtacgactgccgagtgtcccgagccgaaaccacgggacgataagaccaagtgcaataatggaacccaactgtgtatcaagggtgaatgcgctgggtccatttgtctgctgtggaatatgactgagtgcttcctaacgtccaacatcattccgaacatagacaaacggaagctgtgcgagctggcgtgccaaaacgggaacgataccagcacctgtcgcagcaccagtgagtttgctcatctcttcggattacccgacggtgggattagtttacgtccaggatcaccctgtgataacttccaaggatactgtgatgtatttttaaaatgccgtgccgtggacgccgagggcccgctggtgcggctcaaaaatttactgttcaacaagcaaaccctgcaaaccgtggcccagtgggtgacggagaattggtacatggtgtgcctgttcggcatcctgtttgtgatctttatgggtatgttcatcaagtgttgcgccgtgcacacgcccagttcgaacccgaagaaaccaccggcccggcggatcaccgacacgctgcgaaggccgatgaataccctgaggcgaatgcgtcatcctcacggtggtcacgggccccgaagtgttcctgtgccgcacaatgaccgatcccgaagtggaggcggtggcggcggcggtggaggcggtagaagccgaggtgggggtggaggcgatggccacggtgaacgccgcagtgggcacccgacctcctctggcggctctcggccgtctaacagtagtagttccagagtgccagcgcatgggtatggtgaaggcagaggccaacaatactatccaccgaaagccgttcacaaaaaaagacacgccagcaagcatagaaccaaatcgtag

SEQ ID NO: 1030 - DNA, 939 bp, Aedes aegypti
atgatcaaatcgttcgttctattcgccttcctggcgaccttgaccctttgccgagttcacggtgtacctatgactgcccttcaaggtgacaccggatggatggaaatgtccaggttctggataaggctgcctaatttggactatcggaaggaggtcgttgtaagcgaggcgagcatcggaggttccaagatcgccggtggtacaattgccgagaagcaacagtttccgtatcaagcagcgattttgatcaactttctggatggttctggtgttctatgtggaggagcgatcatttcttcgacttatgtgttgactgctgcccattgctcagatggagcgatcgatgccacggtcattgtgggaaccaatgtaatcagtattccaagcgatgatcaagccgtggagatcaaagttacctttcacgatatattggtgcatccgttgtacgatccggtagaagttgtgaacgacatcgccattgtacgattgactagagcgcttgcgttttccaataaaattcagccgattcgtctccccaacaaaaaagaagctctactggatctagcgaatactgatgctaccgtttctggatggggagctttgagtggggaagagtatgtcgagatcacaggcagcgtaaaactagaactacgatacactaataatcctgtgatatccaacgacgtttgtggcaaggtgttccaagacatgattcgacatttccacgtttgtgtctccggagataaaggtcgaaatgcttgtcaaggagattcgggaggccctttgagagccaatctgaatggaaagactactctgattggaatcgtctcttatggttccgtagatggttgcgagaagggatcgcctgcagtctatacgcgagttgggtcttatctcgaatggataacacagcacaccaatgttccgatagaaaattga

SEQ ID NO: 1031 - DNA, 1218 bp, Aedes aegypti
atgtcggaaggattcgccgctggtttgcagcaggacgacattcttcagcagcaacagcagcagagcggcgagtggtcttcgtacaccatcatggattcgtcccgggtgtccacgtgtctcatctcgatgctactgatcgtgtacggaagcttccggagtctcaacatggaacaggaacagcgcgagaaggagaaaaagcgccaaagcgagagcatgaacaacctgatcaccggcgaaccggtacagcaggagcaaaataaattcgcaacgttggacacgatgcacgctctctgcctaccgttgggagcttcgatatcattgttggtgatgttcttcttcttcgattctatgcaaatgctcttcgccgtctgtacagcaatcattgccaccgtagcgctagcgttcctcttactccccatgtgtcagtacatcattcggccctgctcggacggtaaccggatatcatttggggtgtgtggacgcttcacggccgccgagttgttcagtttttcgttggccgtttcgatcgtttgcatttgggtcctgacgggtcattggctgctgatggacgccatggggatgggactgtgtgttgcatttatagcattcgtacgcttaccaagtctgaaggtgtccaccctgctactcaccggactgctcatctacgacgtgttttgggtgtttttctcgtcgtacatcttcagcaccaacgttatggttaaggtggccacccggccggcagacaatcccgttggaatagttgctcgcaagctgaaccttgggggtattgttaaggagccacccaagttgaacctaccggggaagctggttttccccagtatccacaacagcggccacttctcgatgcttggcctcggcgatatcgtcatgcccgggctgctgctatgcttcgtgctccgttacgacgcgtacaagaagtcccagtgtacgcagacagcggaagccggtgttccaccgccgaggggagtcggctcgaagcttacttatttccattgttccttattaggttatttcctcggtttattaaccgccaccgttagctcggaagtattcaaggcagcacagcccgctctgctgtatctagttccgttcacattgctacctctgctgacgatggcgtatttgaagggtgatttgaggcggatgtggagtgaaccgttcatcatacagcaagcatccaagcagttagaagtttaa

SEQ ID NO: 1032 - DNA, 2599 bp, Aedes aegypti
cctttcgttttcctttgtacctccgctgctcgtttcgtgtgtgatttttctacagctcaatacgcggagcggagactctggactgcgaatcaagaagtagttagccaccatcatcagcaaataaaattaaggcaggcgatcaaaaaaaatcattccgcaagcaacggagtataacctggaaatcgaaggaacggaatttcacctgggcaaggaggaggattcgcgattccgacctagttgtgtctagtggaaagtttctggggattgtgtcgtgttactcaagaagaacagcaggaggaggtggcgagaaagatttgctgctcgaattggatattagtatacaaaaatagccgtaactcggttcggcgtggaaaatggattgtccccacataggtgataatgtagccctccggaaggacgcagtccgaaacctgaagatggccgtttgtgtacctccgagtgcggcgacggttccaccagaaacaggaacacctccagcaacttctccagtggcaatttcgaaattgtggaaatgtgcagaatgttccggcaaagacaactggatgtgtctgcagtgtggatcagtgcgatgtgggcgatacgaaagcgggcacgctttaaagcactctgcgaaacagaatcacaacatttgcatcaacacagtcaatttgtcggtttactgctacaaatgcgatgaattcgttgtgaatgacacaccggaaaacacgctagaggagattcgtcaggagctgaaggacggcgatggcgacaccgtatcggagacttcatccacgatggaggagatcagttcgtccaagtcgggccaggaaacggccagcagcacttcgtcgtccagtgattccggttgggaggagccttcgacggtttcgtcagtatcgtcctccaccaccaccagcaacagcagttctgtgtcgtcgtcgagtgtccgaaagttgcgaccccgcaagcgaacgatctccagcgacagtaacaacgaaaacggcacggccggtgctggtggaggcggaacagccaagcgaaagtcgatgcgacgagtcgtgggtctgcggaatctggggaacacatgtttcatgaattcagtattacagtcgctgagtaacatccaggagtttagtggatacttcaacacaatgccctcgctggagacgggcaaacacaaacacaaggcgtaccagtcgcgcagtatgaaagagaacctagacgacgtattcgtggtggaggagctgcggaaggttctattgaatctcagtcagggtggggatggctcgaagggagcaatctcgccagaatgcttattcctggtgatctggaaggtagtgccccagttccggggccatcgtcagcatgatgcacacgagtttctgcgctatatgctggatcgattacataccgagctacagcaggtatcattcccagtagagatatccagcccatcggcgcagaaggctagtgaaacgaaaagtaatccttacaatattccggcactcagtcacttgcagtccaaggggcgaaactctatcgtgaccaatgttttcggtggtatactacagagtgaagtccgatgcctaatctgtggcatggaaagcaaaaagcacgatcctttcctggatttatcgctggacattccagagaagttttacaacaaagatcccccggagagtggggaaaaggacaaggaggggaaccccccggtgtgcaacatttccgactgtttagccagtttcacagaagtggaggaactcacagaaacagagttgtactactgcagttcgtgtaagtgcaagcaaaagtccaccaaacgtttttggatccgccgattgcccaacgtgttatgtttgcacattaaacgcttcagatggaataacttctacagaaccaaaattgatttgcgaatatcgtttccgatcaatgcactggatatgtcgcagttcgtactaaacaatggtccggaaacgagacgctcgaattccagctgtaacatttacgacctggcggccgttattgtgcatcatggaaacggttccagctgcggtcactacacctcgtacgcgatcaacaatggagtgtggatgcacttcaacgatcactcggtgaaagaggtcagcagcagcgcagtggccgagtgcaaaccgtacattctgttctacatcaaacgggatccaaccaacaccagccggctgctgacaacgccttcgacgacgacatgtggggcaccgacggcgaccgcgtcttgagattaagttattcttcttttaagactgattaatatagaaagaaaaagcgcatagcaaaaggaaaaccaacataattgagaagcatgcctggatgccacgataacatctaaacatcaatgagttgggttggcagagaatgttctcaccatgttgcatgtctggtctgcagaattctggttccaattcgaattgtggggttccctgttttctgtccgaaaactgaaacgaataaaaatcgccaaacaaagccgagaaaagtaaagatggtcatattactagcaaaaattttagccaacaaaaccgcaaatgtcaatgcagatgttcaaatctagtagtaaattacc

SEQ ID NO: 1033 - DNA, 8362 bp, Aedes aegypti
cgagtcgatgcccccagctctaaccatatccggtccggttttgacgttcgcgtacgacgaaaaatcgtcgtcggctcgattctgatcgaaaattttgtggattttccccgaaaaagttctgcttttgggaagaaaattgccaaacacggttggcggtggatccgttcgatccagatacaattgaaataaactcattggagcggtgtgaattagcgaagattgaatagtgttgaaagaggggcctcagaagaagccctcgggaagattacctttgaaatttgaagcgaaaagttttgcttcctgcctgtgtggtataagaaagaagagttcggaagaagcgaaaaaagtgccagctattattagtgcccgaagcgcgaaggagtgatagagagggctatatagaggagtgcgtgtgtgtgcatttttctatcagggtagtgccgcagggggaagttttccggcaatcgtcagcagtatatcgagaggctcttttcctgcctatatttcgtcgtcgcagttttgcctctccaaggccgtgtcagtggaaaacagaggaagaatatagaaaaaggaagattgtggatggtttcatcttttccctgcgtttctgacgtgtaccaaagaaagttctttttccttcgatcaaggggagcctctggcagagctctccacataacaatccgagaaacggacggaaactaggcagaaagttgccatactttggcagagaaaaatcgacagatcatagacgagaaagggattttataagcagatctacctggccgaatgaatcgtcccgagagcaggcagaagtgttggccaaagtggcactaattatgtcgcagacggactgaacatactgaagatttttctttttagttactcttattttttttcgttccgattacggcagtctgagaagagtgtgtcacccgtgtggaagcacacacatacgcacgtatttaagtaacttcacttaagggcactaccgtgagaaagtggcctccgtcgaaacgtctacggaacccaaaggcagccaggaccatgttgcccgttttgtgtccagcgtgtcatggataattctaagtcgaagccgcaagagtgctacgaattcctcgatcttagtgacgttgatgattgtgtgaaaagcgcgctggcttcaactctgtacacaccggcttcggctggtgccggtggagctggaggctataagggtactgttggccgcaagcagcaccgcaccaaacgaagacagtcgaacgcttcttctgtgatgtcgtcatccgatggatccggcgtgtacgaatttgtcccatacgagtcccggagatatccttcctcccagcatcaccatcatcatccccaaacggtggccacattcccaaatccggtggcacctgaataccattatcaaccccgtcatcactccacatattcccaacagttcccgtatagttcctcaaatgcctctagcgtcgatggttccggaggtttcggtcgtcatccggcggcatcgaaacgaacggctaacatccgcactcaagaccatcaagccaatccgggtagaaactcacaccactacaattaccatcactaccaacaacaacagcagcatcagcagcagcattcttggtcaccggtagctgtcgcagctagcactattgctgctaccactggtattattgccaccactaccactagtacttcctcctacacactgccaaacagttctgtgaacacaaatctggaagcaacatacaccgagtacggagaaagcgagcaacgactgagttgctcggctcacagcagcagtaccaacagtagcagtagttatcgtgtagtcagcgggagaaattactccagccgaacaggcgaaagagtagctgcttcgacgccggacggcacgacaacagcgatctccgaggcgtctacgacgacgactatgccgccacacacaaacaatccccactatccgtcgcaacaacaacagcagacacagcaaggtcaaccacctcaaacacagcaagggaaccctccaccaaatagtcataatgtagcggtgaacgttagtcggggctcgagcgatcaacagagtgttgttgcttccgctcctcaacagatgtatccatcacagcattacatgaccgggggtcctcccggcaatgcgatgtatccgatgccagtcattccccagccaattcctggaaatgtttacgttagcaaccttacagctaacgtgaacgtacatggctttgtgccgcatggtatgccccaatatgtgacaacaggtgcatctccagcgcctacgggagcttacattactggtgaagttccttctggacatgaaatgcaaataatgactcctcggggagaagcccgtggtggaatgcgacgcaatggtagaagtggtagaattggacacaataccagaccacgaggaggatttgttccacattacatcgcacaacagcaaactgtgatgcaatctagccaaccagctggtattcatcatcagcaacaaccaggacaagttcaaggtcagttacctcaacaaggagtgcagcaatcgcaacagcaacaatcacaaagtcaaagtcaaaatcaatcccaaagccaaccatcacaaccacctcaacagcacactccggacatggtgcaacattcgatgtccatggagcatcaaccaatcatgagtccagcgcaaccagttacttatggaggttatggaggttactatttttatcctccattctacccctcggtaacaccaggacatcatccttcggcgcaacatgcagcaggagcgccaatactccaagtccctatgtatcagaccatgtacagctattcgccgagtgttgtgtaccaaccaatgtattcatccgagtatcctctatacgatggtaaaggggaggatcataatccacaacaaccaccagaagatggtgttatgcatcaggatatgtggcaacaaccgaccatgatagaatacaatccggagaacgtagaatatatcccaccagaggaggatatgaacatgatgcaacaggggcctcctaccatgcagccaataactcatgtgcttgatccaaatgttcctaactttacgatgggacctgcaacaccaattcaaactgacgattatggtcaaatcactccggcgccttcggatgactataatgcaattaacaacaatgcagtcatgtctccagctgccaatctcatatcctctccctcttcaaatgcttcatctctacataatctaaatcaatctgacatgtaccttgtgccacaacaacctcaacaagaacctcatcatcagcaacaactacaacaacagccacaacaccaatcgcattcttcactgatggaattgcaacaagaatcagatattcaacacgaacaagaaccatcacaaccggtagatcaagagaataactacatcatcgaacaatcgcctcaatcccaatacaatcaaccaatgtcaccaccaccccaacagaccaatattcatgctcaagtctcagcacctgttgaaaacagcttcacatcggatcaaccacaaggacatattcaggaacctacaccaacaccaatgcacacaactattgtgcaagagacaattcaacaaacaccagcagcagcagtagcaacactcaacgtaccacctccgccgataccggttcaattccggaatttagaaaaacaacaccaacagcaacaaccactacatcatcaaccaatcacaaacgatagtaacaacaatccgaagaaaaagaccaacgaggtcgcgtcggtggcgactcctgccaccgtagccgttgacaagaccagtgaaatgtccacgaatagcagtaaaccagtgccaaatcagcaatcacagcagcatcatcaatcgcaattttttgtaaatagtaacaaaagtcagacttcaactgaggaagtcgcacgattacaaaggacagttcaagaaaagctcgtcttcaaagatgaccgccgtaacggtccgtattggactaatccaggatctcaacccccggctacaacaatctcatcgtttacgtcctccacaaccaccattgtgcagcataacagtagtcagcagcagaaaaagacaacagcatcggtatcggtatcagccattccaaataaggaatacaccagcagtagtagcacctcatcgggtccatctgtcattagttccactaagccttatcagaaaaatacctcgcccgttccgttcactactcttggaacaacgtctgctcctccgtcgatacataaacaaccgttagcaccacagaagtcctacagttcctccgagcatcacacggcgaccccggtcaactcaggtccggttatggagtccaaaaaagtggaagcaattcctcaacgtgacagccagataaatacccctcttccaccgccaggtcttccgccatctctttcggtgccaccgccacaacgtcagtatactcagggacaaatgatcgtccagacgccctacgtaccaccaccaccggcaacgacggcggctgcacctcagaccaagtcctgggccagtttgttcaacccatcctcttcgtctgctacgtctactccaggaccaacaagcagcattgttcaaccgattgctacttcagcccctgttgcaccgtctctattggctgcaggtccagccctcccaacgccatctcccttcgcgccaagtttcgtccctactcaacatcgtagtagtcattcatcttcggcatcgaatcagtctgcggacaaaactacagcagcttcttcatcaacatcgaacaaaccgatcgccaaggtgtcgcctttcgataagtccaataacaacagcaacagcggtactacggccatgtcctactcggctgcctcggcccaaggtcttccatccgcttctgctggtcatacgacctccgcaagtgcctcggcagccagtaccgccagtgctggctccaaaaacaagaacaacgctgccgcccaggcgcaggccgccgccgccgctgccaaacccgaacagatagatgagaacactctcaagttaggagaattcctaagcgcgtaccaaatcgaaaacaacagcattagcatccttcccagaggactgatcaatcgttccaactactgctacatcaatgccatcctacaggctctagtggcatgtccaccgttctatcacctaatgcgggcgatccggtcgctacccgcagccagaaacagtaaacaccagaaaccgttcattgacgctatgtccgctctggtagatgagttttccactctgcagttacgctccaaggtacagcgtgacaagacgaagaaagacgagactccggaaatccagtgcgattccccaatggaaccgctgatgatccacaggatgctaaatcttctgcgatcggatattttccaagtcgaaggccgtcaagaggacgccgaggagttccttggctgtgtactgaatcggttgaacgatgagatgatagagttgatgaaactgagcaaaaacgaatccgatgtcaatggggatgacgcggccaacggagaggtccaccccgacgaccaggatgattggaaggtcattcgcggcaaccggaacaagggtaccgtcacccgcacgactgactttggccgatcaccgatgagtgacattttcggcggtaaattgcgatcacgtgtccaccgcgaaggcgaccacgcaaccgacaatattcagcctttcttcacgctgcagcttgacatcgagaaagccacctcagtgaaggatgctctggacctactagttggcaaggaccaactagaaggcgtgacctgttcaaagaccaagcaggaaattgctgcctggcagcaggttaccctggaagagctacctatcgtgatgatcctacatctgaagtgttttgactacaaaatggatggatgcaccaaaatcctaaaggcgctggagttcccgatcgaattgaaaatcgattcaaaactgatgtcctcgaagggcaaatcgtacactgccaaacagaagcagtataagttgttcgcggtggtatatcacgatggaaaggaagcatccaagggtcattatatcaccgacgttttccacgctggctacggtagctggattagatacgacgatagtacggttaagcccgtatccgaaaacaatgtgctgcacccaaaatccccaagggtaccttatttgttgtactatagacgacttgatacgcattaccatggttcggccggaggcgccggagctacaacgagtggcagtactggaactggaggatccggttatggtagcggaagcagtagcagcaacacaaccagtagtagtaacaatagcagcaccggtggcaatagcaattatagttctagtgtaaatgctggcggacactacggtggctccaaataagagaataagcaacgtgaaacggttatacagttttatcggttgaaaaattctatggttctgtcgaagttcgagtgtaagcgatagaacattgtacagtagatcgcaatgaaaaggacgtttttatatagtttatagtgttaacaataagctcgtgagtgacaacgattgtgttgggattttgtgttggaacgtttgtgattttttggatcctcggatatttttggatacggtacatgtggacgttgaaagcagcccgataaaatcgtatgtgatcaacgaaaaaaaaaaacatcaaacataagggattaaccattggtgtaaagaaaaaagggaggggtcgagtgttgttgaaaaattttgtttataattcttaatattctcacgaaaaactttttagtttgttaatctattattattattatcattatagtagtgatatcctattgtttgcttttttatgggattgagcgatactctcatttaagttcctcctggtaaatagtccttctatagtatagcaataacgaaacatgtttcatactgatccgtaccagaagatacgagcacgaaaaggaaaggcataatggtgaaactgtacctatttttcaacgtgaatgttggtttgactacaggaagcttcgcagcatcattattttgctttgaaactaatttgatcggtcaaagactattggttgcgcctctaagcgttatgttagactgttctgcaactgctaaatgtcgttggacgcaataagcgagatgatcagcctatgaaacgatcggtcaactctcttatggcgttagaaaaaatgttgatatgagtaacgtgtttgttttttccttgttatgcttttcaagcactaatttgtaataaaatattagattcgtacacttaacaagaaccaattcatacatttaaaaaccctagagcgcatataaagaaagagaatgtacccttcttacggattagataggtagactatagaaagtggatgaaatcccagttaaaaagctagccaaattcgctcctgcagttggatgataacttccaccaagtgtattgaaaacgagccgaacgagtgagttctgcgatcatccaatttttgcaacaggaacagaacagtagttgcggtcgaggtataggatttatccgcagtcaagcgaaaacgaccggaagcgtgtgtaatttactttcattgagaagattccgcggagtgttcgcagaatcttaagctgtgtaaataggtgattcagtaactaacaaagtaatgcaacaaaaagtctgtatatagaagatagtaatagagtctgaggtaaaacattgagtgtagatttatgttgataatgcttatgaacggtgttaaaatgcagcggtcagatgtttcgtatatattaatgttttgaatgattcgaggtaattctggacgatcgcggtagttgaaaactgattttgactaatccagggaaagatttagtcgcactgaataggagagaagacagcgatagatagtatttgtctagtttttttggatcgcaatttaaattacgcactaaggcgcactgctaatatataaccacttaaacattctgggaatatctctagagtttttcgaatacattttgaaagaagcatgctaaatgtggcaaaaaggaaaccaatatgtgtagtctaccagataagcaaatgtctggttaggcatatcgtgtttttttttgtatagtcattctagaacttacagaacgtaatctttatttgaaggtggaataggtggagtaataaagtagttgataaaataaatctacatacctaccccgttacgatatggtacactggatcaaacatttgttttcttttcaaattagcttgggtaggttgctgaataaaggaccatagctgagtccgggaattattgtatttttgatgagtactgttcactgaat

SEQ ID NO: 1034 - DNA, 4886 bp, Aedes aegypti
cccacttccattcaaaacacgaccgcagctagcgggtgaagtaaattactaaggtctttttctagtgtgtagcagtagttcctgctttgattttactcacacatcgtgccagttttaagtaaatcctcctccagttcgtcccattttctttcagtgtcggtgtcgagtcgaatcgagagtgttcgtttcgcgtttatgtgctatccattcctagtaatgtcggggtaattatactttcgaaagtttgattatttttgaaggagttgcgtcttcgcgttcgactcgacgcgtttattgtgcaaaattacgtgagtgcgattctgggaagtaggaagcgtcgaatcaaagcagcctcgaatggaagaagaaggccgtcgatgagcgtcgtcgtcgtctgtcaaaaagtcatcgtcgtcgtgtttcttttctttctgttttcttgttttgggtgtgcaaaattacgtgtcctctcgtggcctctgtccctggccagaggggcgcgccataattggtggtgtgaaaaagtagtgcttcaccagtgaagaaatatggagaacacgaaaaacaaccccaacatcagcagcagcagtggtggcagaagtgagaaagttaccagcaattcctccgcccccactgtcaataatggccaacaacaaccacaagggaaggggtccaaattgaagcgggccttctcgatgcctcggaatccgttccagtcggtttcgcgtcagacgatgggcaggaaaacggtcgtggaaaagtccggaactggaacgatgacgaatgcaagcgtcgtgacctcggaacaaaattccatcaacagtggtggaggaggggtattgggagcaggtggaggaggaggagggagagttggcaccgatgcaaccaaagtgcaaggccccgaggccatcaatcggggggagaagaagatatttcggcgcctctcggtgaagaagttcatcaatcgcattgcacaacagatgacatacgtcagtcttgcgggcaaccaaaagggcgctgatcgtgttccaccgccaccgccggccaatgggttcgtttggccaccggacacggtaccgggtgtgatcggcctgcggaaccacggcaacacctgtttcatgaatgccgtcctccagtgcctcagccataccgacatcctggctgagtacttcgttctagatcaatacaaggcggatctaaaacgacgtaacaagatcaatgcgaaaaagtttggaaccaagggtgagctgacggaacagttggcgctggtgctaaaatctctctggacgtgcaaggatgcccccgaatatagttctagttttaaggccgtggttgaccgatacggaagtcaatttcggagctcgacgcaacatgatgcgcaggagttcctcttctggttgctagacaaggtgcacgaggatctaaacaccgccaccaagcggaaatacaaagcgatcaagaacaactacggccgctcggacgaagtgatcgccgccgaaacgctagccaaccacatccggtgcaacagctcgttcgtgcaggccgtctttcaagcccagttccggtcttcgctaacctgcccccggtgccataagcagagcaataccttcgacccgttccactgcatttcggttcagttgccgcagctgactctgcagccggtgtttgtgcgagtgatctacgcctcgcagcaaccgaaacaggttcagctggggctgggggttccgcatgggtccccagtgatggtgctgagggaacaactgcacgccgacacggggatcgccgtcgaccggatgatactggccgaggtgtgcgaggggggcttcagtcgggtgtactgtgattcgcatttggtgtcatcgattggggacgatggctcggtgtactgtatcgaaagtccaccggtggcagagggcatgacgcaaatagtgctgtgtattaccaatgggcgaagggacgtcggaagtggcgaagttcgacggtttggaactccattctgtatagtggttaatagggatgtttcgtatgtggagttgcagaagttgctgttgaaggagatgtcgagtattctcaaatcggaagtgtttgcgttcagtactcctatgcaggagatgttcaaaatgcggttgcaggatccgtcatgtgacgcggacacttacttggaatcgaatgtagagcacccgttgtttacggagatgatagatttggcgttgtcggtgctaccaaccgatgccggtccagcacatgtgaaactgctgattgagtggactaatccagagcgattcttcagtgatatgacggatccttttgtggaacatgaaagcgtcagtcagatgaaagagaagattccgggcagttcgtcgctgacgctggaacagtgcctagagcattacactaaagcggaaacgcttagcgcagaagatgcctggaggtgtcctcattgtcagaaatatctgcctgtggtgaaaacgctagggttatggtcactgccggacataatggtgatccatttcaaacgattccgacagcaacaattgcgcggacctcaggctgccaaattgaccacattggtaaagtttccactaaccggcttcgatatgtcaccccatttggcgagagattcgaatgctgaagcgtcctccgtcagcaacggaacggaagacaattggagtccttggcgaaaaactatcaatcgatatacaaaacattcctcaaaccactacaatcaaaactcgctaccgatggacaatcgttatgacctttatgcggtgtgttaccaccagggcgacactttggaaactggccactacactgctgcatgcaagaatccctacgaccatcagtggtacaaatttgatgaccaacgcgtggcacaagttcccaatgaacgcatccaagaagaaatcgttaacaatgaggcttacatactgttctaccaaagacgaaaaatcgatggatcggaatgctcgggaacgagttcgagttctggaaacgatcattgggtgtcgagaatatccgcagctccgctgggtattactcatgaaccgaagccaaaggtagatccgccgaaaccggctcctgccgctactcttactgcaactacaacgtctattactgctaaatcggaagtgcaggcgattccgataaaagccgaaatcgaagaaaccgccaccatacattccgagagtgaaagtgaaacgagtgataacaagatgcctaaagagaccagtgttgagtttgaaaaagttcaaacaaccgttgtgcaagctgaagtagaaactcagaacaccgacagtcatgagattgaggagccttcggaaaagccgccctccgtcaccgaggaatcggttaaatctctcattgaggaggaaacgtctgaaggagacacctcaaaagaaggctccattaaaactcttaccgatgagccttcatcgccagaactgcgaaaatccacagagccaacgacctcggagcattcggacgatacaagcgacagtacgaccaaatcgcccgattcgagcagtcgcttctcgttgccaacgtcgcactcgcattttccggagattctctggggtcaccaccatcatcgaccgtcatcatttacggcgtacaaatccagctacgagccggatgcggtttcgatgatgaggggggccaacacgtgcagcaaggatacgttgctgtttatcgatcagcaatcgcatgcggcagggctggaccgagtcatgatggacgacgaggacgattcggacgacatgatgagtaacagtcgggcgctatggatatcgccagtcacgccgcataagctgataacggtctcgccgaagaactaaccgaggtttgccgtgtgaacgagtcgcaacaagtcgaaaacagatttcaaaaatctaccaccaacctcccaaccaccaaataacgaacattgcagtgcagtcctaagtagctgaaaccgtacgagacagagcatcagtattcgcagcgtgaaagtaccttcaccgacacgtgcaatgcgagtcacgcagctctatttatatatgatcatgttgaaagttttaaatcgtttttatgttataatttttgtttgcctgtgagtaatatgtagtaggtaaaaaagtcactcatttattattatttattaaaaaggagggaacgagggttcgtaaaaagtaacgctatagaccgtttattgtatattaggtggtgcgcggacgttccgattgcgggcgtatccgtgttcgggtgagtatttatttgagctaggaactagtagactaagatagcagaaacgaaaagaaaaaaaaactttactgtatagagtcccattcctctttaaccagacacaagatttactacctaaatatacaatcctatttcgcgttagacacattcttcaagactttccaaattaagaagagagaaaaactttagactaaatcaaactgttcggtacccacttgcaagttcagatcacaagaccgaagttagagagcaattatctagagaatgtaaatttacactacgtgaacctttttttcgagaaaaaatttaacgcgtttgcattacctttggggtccgagcagagataagcagcaggttgcagcaaagccatagaccagcccgtccccgccccaaaaatctataggctagcatattggcattgacgactgagtttagtagcgagtgatacaaacggggtctgtaatcaaccaaattaacgagagatttttgcgtagatattcgccgtgcggagtgaagcggaatggatagcgtttgcagtcaggcaggaaccgaataaaaacaacattaagcatacagaaacaagtacaatttaatgttagttatttgattgtaaaaagaggagtaaaattataaattattagaataga

SEQ ID NO: 1035 - DNA, 2554 bp, Aedes aegypti
atgccggatccaacgcgaatcgattccttggtgaaggaattcaacgatagtcctcatgggccgaaaaagttgcaccagtccaggacccggtttatgcccatcgtttttggccgagatgggaaggctcaaccaaaacccggacctcgcagtgccgaagcacaggacttctatgccttgcgaaagcgatgcctccgcagcggaaccctattcgaggatccagaatttccagccaacaattcatcgctgacattcagcggggaatcccggtcaaacctcaaatggcttcggcccagtcaaatttcaccagatccgagattcttcgaggcaagctattcgcggttcgatgtcaaccaaggagagctcggagactgctggctgctggcagcggcagcaaatctaacccaagatccacaactgttcaccagggttgtcccggaggacaacagcttcaaacaggactatgctgggatttttcacttccggttttggaggttcggccagtggtgtgatgtagtgatcgacgatcggttaccgacggtgaatggcaagttggtctacatgcgatcaacggaagataatgagttctggagtgctctgctggagaaggcctatgcgaaactgtttgggtcgtacgaggctctgcggggaggatcggctagtgaagcgatggtagatttcaccggaggtatagcagaatcatacgaaatgaaggatgttccaaaggacttgtttcaaattattgaaaaggggttcaggagtcacgcaatgtttgcgtgtagtttggaacccgatccgtacaagccggaggcggaaactcctcaaggtttgattcgaggccatgcatattcgttgacaatggccaagatggtggatatccaaacgccgaatgttaaagggaaaattcctttgttgaggctcaggaatccctggggaaatgctaatgagtggaacggagcgtggagcgataaatctccggagtggaaatatattcccgaagaaacgaagcgagagattggtttgatctttgagctggatggggagttttggatgtcttatcaggacttcgtgaagtacttcgatcgtatcgaaatgtgcaacatgagtccagattgcccaataatccgacaaagtggaaactatccctggaagcaatcgtctttcgaaggtgaatgggttattggaagcactgctggtggatgcagaaactatccagacacattctggcataatccacagtatgtagtgcatctgaaagaacccgacaaagatgatgccgagggaaaggcaacagccataatagcattactgcagaaaaatcgaagatctaagcgcaacaaaggcatggactgcctaaccgtaggtctaatcatctaccgagtaacagaacgtgatctcatccgaaagcctctgcccaaagaattcttcctacggaatgcttccatagcccgatcgaccttcgtgaacttacgagaagtgacctgtcgtttccggatggatcccggaacttacgtggtggtcccttccacctttgagccgaacgttgaaggcgagttcatgattagggtgttctccgaatgtccggactgcatgaccgagaacgaagactgcgttggtgaatgcgacttggatcctcggataaaaatgaaagtgcccgatcccacgaagcctgatccgcagcggcaggctatggagaaactgttcctggatgtcgctggagtcgacggcgaggttgactggatggagctgaagttggtactggatcactgcttccgggacgacatagcgattgcggccaaaggagtctcccggagttaccacgtggccccggtggaatccaagaaatccctgacacctcaaggtgaggtcgtgtgttgcggcctgttggccatgctgcaggattggtacgtcaacatggccggtggagacaatcgtccagagcgcagtacttccggcgatttcgtggtcgccaaggagagggctcctctcatgaccgccgaaagcagtgccgtcgggttctccaaggatgcttgccgttcgatggtggccatgctcgatgaggatcaatccggcaagctcgggttcctggagttccagaagttgctgaccgaaattgcccgctggaaggcagtgttcaagctgtacgacacggaccgttccgggcatctgaacccatttgagttgcgggcagctttgcagtcggccggctaccacctgaacagcaagatcctgaacagtttgatgcatcggtacggttcacgcgagggggagatatggttcgatgattttataacctgtgcggtgaagatcaaaaccatgatcgatatcttccgcgcaaaggacgtgaatggaatcgcttcgttcaacatggacgaatggatacagaaaactatttattgttaatgccagacgtgtgttactgtgacctgtgctcgactaacgctcctctaatgcagtttgcctatttctatctccgaagaggccggtactttgaaacaaagtttatcttttattgttgattgtgaaactgaataaagttgtttgaatttatctgtcg

SEQ ID NO: 1036 - DNA, 1481 bp, Aedes aegypti
atggaaaagatgtcgtccaaccggtgctatgcactgctcttgacctttgctttgttctccgtagtcagtgcctcgttcatcaacccctatgcacagttcatgaaacgtggagtgtattcttcagagcctcgcatcaaggggaacaacggggaacctttgttcatcacaccgtacttggaagctggaaagattaaggaagcccaaaccgcagctcgagttagccatagtcgtatcgtaggctttgaaagctacactggattcttcaccgttgacaaacgatacaactcaaatctgttcttctggtacttccctgcgaagaacaattccgccaatgcaccggtattactctggcttcaaggtggaccaggggcctcttctctctttgggctatttgaagaaaacggaccgttcttcatctccaaaaatctgaaagccgttccacgacaatactcctggcacatcgatcacaacctgatctacattgataaccccgttggtactgggttcagcttcactgataacgaagacggatatgcacggaatcaaacccaagtaggagagaatttgtacgaggcattgattcaattcttccagctgttccccgagctgcagaagaatccattttatgcgagtggggagtcttatgctggaaaatatgtaccagccattggttatactatccataagaagaatccaacagcaaagatcaagatcaatttgcagggcatggcaattggtaacgggtacagtgaccccgtgaatcaactcgactacggaaattacctgtatcagctgggcctgattgatgtcaatgctaagcaaagatttgatcacgatgaagctgctgcggcagaatgtgtcaagaaaaacgattatcagtgtgctttccatttcatggatgagttgttgaatggcgacgatgaaggagcatccttctttaagaacatctccgggttcaacacctactataattatctgcacacagcggaggatccaaaggacgagttctatctcataggatttttaaagctatcggaaactagaaaagcaattcatgtgggcgaccttccgttccacgatctggacggtgaaaataaggttttcaaatacttgaagcatgacattctggactcggttgctccgtggatcgtagagcttctgtcgaactaccgaatgatgatctacaacggtcagctggatatcatctgcgcctacccgatgatggtgaactatttgaaaaacttgccttttgatggtgcggatcagtatcggaatgctcaacgtaacatattttacgtggacgacgaaatcgccgggtactacaaattggtgaacaacttgttagaggtgttgattcgggatgcaggccatatggttccacgggatcaacccaagtgggcgtacgttatgatcaacacgtttacgacaagatcaagctttgtaccagatgattaaaataaaagttgtataaaagagagctt

SEQ ID NO: 1037 - DNA, 441 bp, Aedes aegypti
atgagacaaatcgatttcgcagccgtactagtgctggcactcgtgttatcgatcagcgtatccgaagcccgacgcatcaagcgacagcagtcgaatcgaaatcccttcaccacctattttccaccgagccagaaatttgtccgaaaccgaccgtcacaaatcagcagcacaatccagccggtacggaccaccttcctaacgtccgactttttcaacgacctgaccacgacggtccgggtaacgcgtccaccactggaacccaaaaagccgtccaggtcacgggaattttatatttgcatgaccaactgcctgacgctgagccactacaatccggtctgcggaacggaccacaccacctatcacaacgtgtacaagctggaatgctcgaatcgatgcggcgcaagacctagagttcaagtcagaaagccgggcatttgttga

SEQ ID NO: 1038 - DNA, 1396 bp, Aedes aegypti
acacacaagctgagaaaattattccacccatacctggcaacacttttctaggtcatagactgcactgtaaggcgtctaacttagctcagatcagtcaagaacttcctgttcgtacatcctcgtcgcgtggctaaaccattggcttcatgtaaatgtctggcccgagttggatggttaatctaagctcgtaatccatgccatctagaagccgaaggcgcgtgtgcggtatcggcggcaacagcagcggctcagaacagccccaaccgttggtgaagcgtggtggtattgaaagaggcgagtagctcggtaactcggctgggctgtgctagcattattggaagatctcactcgaactttacaagatcaattaaccagttcagcagtattcagcaccgttgcccggctatagttcgtcatcatcattgctcaatccttcggtctggccagtcatcagcacgctactggttgtcggattgatacgcatacgtcataacgcgatcattaggaaggaaggaagctaagcttcttggccacgtacggaacggattaagattagtttacgttggtccttcgctagcggtggacgcgattcggtgatttcgaaacctttattaccatctccaagtggtgtttgggagagtcgacacggtcgtcggtggtgaaaaagtgcgagcacggaacacccttaggcggtggctgtagtttagaaacgatcccacgcgctgcaagttttcacccagttgtcggatatagcaccaagcacgtaaaaagtgcagagcccggaaagagcatttcttcgcgccttttttgagttggataagagcagatcaaacaagatgagacaaatcgatttcgcagccgtactagtgctggcactcgtgttatcgaccagcgtatccgaagcccgacgagtcaagcgacagcagtcgaaccgaaatcccttcaccacctattttctaccgagccagaagtttgtccgaaaccgaccgtcgcaaatcagcagcacaatccagccggtacggaccaccttcctaacgtccgactttttcaacgacctgaccacgacggtccgggtaacgcgtccaccactggaacccaaaaagccgtccaggtcacgggaattttatgtctgcatgaccaactgcctgacgctgagccactacaatccggtctgcggaacggaccacaccacctatcacaacgtgtacaagctggaatgctcgaatcgatgcggcgcaagacctagagttcaagtcagaaagccgggcatttgttgataaaacacttacggtccgttccgagagccttcgatccagtttgaagtggctcttacttagaggtagttgaaatgatgttggattgttcagtagagtgttaataaattattattgaagca

SEQ ID NO: 1039 - DNA, 1340 bp, Aedes aegypti
atgggaataattttaatcgtttttcattcaacaataatcgcatttccggttgctaatgaaacagagaaccgcgcccgctatgaccactacaggttgtatcgcgtccaactggagacagatcaacacgtgcaggtctttcaggatctggaggccaagagcgatagttgcacgttctacggccatgctcggcaaccgggacaacagctgaccatcatggtcgcgccaacaaggttgccgattttgaggactcctggatcggttcttggtgaaaggacgggttctggtaagtgtgaatgcaacgttcagagcagaatcgatgcagaagctaaaaccgttaaaccagctactgccgcgccatctgagttcgactggaatcattatttccatctggagacgatttacgcatggatggacgaactcgcccagaagcactccttcattaccgttacttccttaggaatctcctacgaaggacgcccgatcaaaggcatcaaactttcccgcaaacccgacaacaaagccattttcgtcgagggaggtatccacgctcgggaatggatctcacctgcgacggccaccttcatcctaaaccaactgatcacctcccaggatcctaagatcgtcgatctttccaccaactacgactggttcttcttcccaactgtgaacccggatgggtacaagttctccttcgagagcgatcgcctgtggcgcaagaaccgtcaaccgtacggtatctgccgtggggtggacttgaatcggaacttcgatagcaactggggcggcatcggttccagcgatgatccgtgcagttacgatttctccggaggaagtgtattctccgaaccggaagctaaggcactggccgatttcatccgaaagaacgccgagaaggaacggatccggacgtatattgcgttgcattcgtactcgcagctgttgatgttcccgttgggtcacacgccagaaaaggttgccaactacgagcacctgcagtcgataacggataaggccattgcggcgttgacggccgttcatgggacggagttccagggagggagcaaacacgagacgatctatccttcgagcgggggaagcatcgattgggcctatcaggaggccaagattccggtttcgctgacgttcgagctgcggggaccaccggattcgaccgatatgttcatacttccggcggaacagattacgccggtgggagaggagaccatggcggcgttttttgcgattgtggaagaagcccagcggctggggtactacgattgagggattttttagattattcgttttgtaaatggtcaattaggataataaattgttcaaaa

SEQ ID NO: 1040 - DNA, 2348 bp, Aedes aegypti
gccatggttatcatatcagttgttctcattctttcggtggcattagccgccacgggtttcccatcggacaaaatcgtcggtggtcatttcgcggaggacaatcagttcccgcaccagattggacttttctatacgggcaacttccgctgcggtggctcaataatcgatcagcaatgggtgctcactgccgcacactgcgttttggacggaattaataaaattcctccgagccagctcgcggtgtacgctggatcgtcaaacctagccggagatggacactttttcgaagttgaggacacttttgctcatgaattgtatggtgaattccaaaatgatatcgcgctgatcaagctgaaggagaaaatcgagtttgacgaaagcatgcaaaagattgaattgaacactgaagagttgcaggaatcggatgcagttaccatttctggcttcggacgcatcggtacgggcatggacatttcggaacagttgaaatatgccacaatgtacgtgttgcgagaaaaggattgctaccaagccgcaggtttcgtgagcaaggggttgatctgtttcaacaacgccgttgacaatggagcctgcaatggcgattccggcggtcccgctgtttatgacgggaaactggttggtgtagccaactttgtaatctccgcatgtggaactcaatatccggatgggtacgcgaaggttgcttactatgtcgactggatcaagcaaaccattgaaagccattgattctacagtttctatcgatatccatacaaaactcaatgatatgttcattacatgaaacaggtgcacatggtttattcgggttttggaagatgataaaatggaatcaaatacataaatgtcgagtgtaatgctgttcgcttgaatttttccgaacttgcgcctaatctatcagcctatgttcacagcatagccttaaactagtaattaactttttttcctcaacgaggaaaacatatatttaaagtcttttgaatcctatgctgcgtgatacctaaacttaaccaataactaaggaattgatcgataatcagggaatggggaaaaacatactgtcttctcaggactaaaagtaatacataaatagttcgtatattcataactaaatcctactgagttcagctcttgttcatgttaaacaccaattagctattattttttcagtataccagagtacaatttgttgctatcaaaagaggtttcttaggtactaaaactacgcatcgagatcgatcacttcgtccttgatgctcacatagggatgcagcatgtggggcggaatttcatgttcctcgtcatcctcgtcctcgagcctcgctcgtttgatgctgaactcttcgtacggatagttgctgctgtcggagttttccccgccgaaaaatccagaattctccaaactagaccgactgctttcgtttaactgttgctgggattgcgagagctgttgctgctgctgctgagagaagtgcatcttgatgacgtgtttggagaagtttgagatcacgaaacgatcgccctttttggtgggaagcttggacactttgatttgtaccgcacacatggggcatttaatgaaggcattgtagccattgagttcataggtgacattgatcatttcttcggtaagagtgagcttgatcggttgcttgtcgctccacatttcgatcagtttgatgatgatattctgaatcttcttgactcgggcttcgtcgctcagcggaggatagacggtggcttgctcgaaggcgaacggtggatttttggtggaagcgatcttgatgtctggtatgtgttcttggagcatttcgctggcttgattgaccagttcttgttgctgttggtgctgttgcaattgaagttgttgcatcatggcgcgttgctcccgtatttcccgcaccagattgatgtctgcaattcgttccggcttcactggccgctcaacgacacgctcagctcgttccattctctcttggacaggtacgggtcgttccgatcggtggttcaccattggatccgcgcgctgcagttcgttggcggcgtttgtgtaattcagataggcactcatctgcaacagtagcttgcgatgccctgggaccagtcggaactcccgtgcgggatcagtgcaaaatatgtggaagtagaactgcgtctgcgggaccaagtgaatcaactcttcgcgggcaaaacgttccatatcaacgaagtcgtcatcgttgagatttcgcaagctactctcctgctcatagccacacattttcagcaggttcttgaggtaggttggtactgagccacacactcgctcgattcgactccagttgatgttg

SEQ ID NO: 1041 - DNA, 2390 bp, Aedes aegypti
cggcagtacaagataagtattagtttatcaaacagattgaaaaaggattttgcgggaaaacccaacaaatatgcaatcatcaacccgctcgagagccgatatgactaccaactttgttgctaaagtcgcacgtgtcagattggatgcaacaagaaaggccgtttgcgtacgaaaataagcctctccgtgttcaactacttctcgcgctccaaccgatcaattgacttataagagagagaagtatacgtagcacgatataacaaatttatttatccgacagcagaattgaggggattcaccattgagtttcgacgactgaccaccactggaatgactcgggtatggctcagtagagcaacattctgcattctatgttcaaccggcaacgctaaaggatttattagtgcttctatggattggctgtgcataaaaaagcatttaaactgtgcattttcctgtcccaaaagtccattcatggtggtagaattcaccaaagatgatattgcttacaactgcccgcgagttcgacagaaccctaatgctcaaaagttttactatctgaaagagcactgtctggcgaacaaccttctcttcgaagatcccgacttcaaggtggagaagcaaccccttctagggtaccaactatctacgcaaaccaaactgaaatggttacgtccgccagagttcgtcgacgacccgcagttcctcgtcaaccagccatccggttttgatgtccatccgggataccttcccagcagaagtctaagcgctgccctactgaacctctacgccaacaaacgaacatttcgacgaaccgtcccgcatgataattcattcttcgggtcggaatacgccgggatattccacttccgcttctgggactacgggcgctggctagacgttgttattgacgatcgtctgccgacgatagacggaaggcttctgttcaccctgtccacccgtcccaacgaactgtggtgttcactgttggagaaagcctatgccaagtttcttgggtcgtacaacgccctgaaggatgtaacgatcagcgaaaccatgcaagacttttccggtggcgttacgcagtgttactggttcaatgagtgcaacttgcctccggaatatttctatgaattgatcgaaagagggctggataaagggtcgatgattgctggaattcgtttgcatagaaaccaaagtttggaagaccgttcttgccatgttcatccgattactcaaacgatggcttcaggttcccgccttgtttgcttgggttacttctgtaaccaacaaacaaacccagaagagccgaagcctagccaagaccttccaaggagattctggttatgcatcgaagagttcatggacagattcgatggagtggaaatttgtagcataacgccagatccgctgggtgaccccgaaggcagtcaacggatttggaacacctcgttctacgaaggcatttgggtgtcgggactgacggccggaggttccaaagatcacaaagtttcctacggtatgaatccaaggatcagaattgaattgtccgatccggataatggaaccgaactgtgttctctagtgatatccctcatgcagaagcaacgtacgggcatggtgctctgcttggtgattggattcgaagtgttgtccagtaacaacataactgtggcccggacaatctattccaactcgcgagaagtaagctgccgattacaactgcctcctgggagttatactatcattccttcaactaaacaaccagacgaaaacggtacgttccttctacgaatctttaccggaccccaagtccaacaagaatcggaaaatggtttcgaagtcatccatcctgcccaatcgttggtaaaatctggcacctgggagtccatgattcgtatgtttttcgatctagcaaaccactttggattagtaagctctgccgatatggctctgataataaacgcctacttcctggattctccacctaaacgcaaacggaaacgctggcctgtattcgccattccactcaacaaaccggttatactgccggttaacaagaatataatccgaacgatgtacaagaaccacgctgtccaaacggcactaacggaacatatcacttgcatgcaaagggaacgctcaagaagtttaaattttgaacattttctggaaatcctggccgaacactgtcacaactggcagcagatgtacaatctagttcaataggaaattccgtagtttgaaaaatcaatgaaaataaaatcaatgataaaaaaataaatttttaagtatttgctcaatggaaatcttaatttacatttagtctcacaaagggctttgttcgggatgattgttagtctgatgttcaccaacgagctctaccaggt

SEQ ID NO: 1042 - DNA, 357 bp, Aedes aegypti
atgtatgttagtaaaaattcatacatctcaaaatattcagacgttatacatgagaagagcatttcgtcaacacatcacgttggcgttgcacgtgcccgaccaatacacgcaacatacggaatctacgtgcacgccctagaacgaagaatctcctgcctcatcgggattattgcacgcaggctggtacctgagcagacaactattatcatcgggagttctcggctaacatccagcaaggaggcagataaccagcggaccacgacgaccaagtgtttcagtattcgacacttccgagcggagaatgagtcgcgagttgatcgcgacgacgttgacggaaatcgtggtgtgatcgcttaa

SEQ ID NO: 1043 - DNA, 3247 bp, Aedes aegypti
ctgaactgcatacttagctttaaaataaagatcaagtcccaaaaaacatgcctcagaaatctctaaaaagtgactaactaccagccctgcgtatagcatcgcactttcgctagtcgaactcccttgtaccaataccaccgccggtagctggctgtgtcgtttgtaccataatattatttaagctccggacggatcgtgccccactagtcgtcagcaacaactcaaacggtgaacacacaaaataacgaaacgctaacatttttatttcgctcaatctgtaatcaagcgatatagacacaaagactttgtgatatttttttttcgaatttcaaccaagaagaaagcttttataacgaaactgcattataaaaaatcgtcgttaattttaaggtttggcgcacaaaggaggcggacgtcgtgaacaggaagtgcttgtgctcatcgcagcaaccggagaaagaatcgtattttggttgaaaatccagattcaagtaattcaagtgaggtgcgcgacatacgcctactatataccacactagagggtatagattggggtgtaaagcccgaattttcgcggggctccaaaagtgcgttgaagagcgaagaagaatcagtggtgtttgacgcgacacatcggaccacttttatttttggcctcggcgcggtcgtgtgactcgattcggagcagccatgccaccttcacgcctagacgggctgtatcgatcgctgctgttgaccaaattcttctgcaaaggatggggcaaaccggaaaatctcgagcgactattcgccttccggaagatcatctctaaccgggcggcctgctccaagctcgtgccccaggactacccgatcgagatcaccaaagaggaggtggcctccgactgcaagatcatcgagggcaagttcataaccccgctggagatctacctgccggggctggtgccggatgtcgtccagaatgcacacttccaggtgctgctcccgctcaagtggaacgacgaacggttcaagccgatgtgcatccacctggccggaacgggcgatcactacttctggaagcgacggaatctgatcgccaaaccactgctgaaggaagctaacctcggtgccatcatcttggagaacccattctacggtgcacggaagcccaaggaccagagagcctccagcttgcacaacgtgtcggatatcttcgttatgggcggttgcttggttctggaatcgctcgttctgctcaactggtgtgaacggaacggatatggtcctctcggcattaccggtctatcaatgggtggtcacatggcttccctagcggctaccaattggcccaaaccattggtgctggttccttgtttgagctggtccacggcttcttccgtattcaccgaaggcgtcatgagtcactcgatcaactgggacgttctggagacgcagtacttctccgatggaaattaccgcgagcggctctccaaaatggttaccgtcgtggatgacgctttcgtagccggtcagagcttcatcaagaacttcaaccaatccgtcgaggagctcaagcaggacatctgccaaacggacgatctgatcaacgatgatcctaagcccgacgtcaatctgaccgtaatccgtgaaaccacgccggaacgagaacagaagcggatccacatcaaccgacggaatgtcctcaatctttcggaaccgcttttgaacaaattgctctcggacgtcaagtgcgaactgaatcaagcggaaatcgacgagcttaatctcaaaatccagctggcactcaaaaactacaaggaggagaacaagactgacagcgacaagctgattctggaagtcaaggccgaggaaccgcaggaagctcttccctcgaaatcgctgggagccaaaatcatagagttcatcagctggagcagttctagcaatgcaaatgcgactgcgaactccacagaagtggttcccccatcgccctcatctgaggtcgctccgttggagaaacggcaaccgatcgacaccaccaaaacccgctggtgggaacgggaagcgctgcagtttatgcgcggcatgatggacgagtgcactcatctgaagaatttctccgtcccatacgacacctcgctgatcattgccgtttgcgccaaggacgacgcgtacattccacgggacggctgcgccagcttggaggagatttggcccggagcggaagttcgctatctggatgccggacacgtgagtgcctacgtgctccaccagaagctgttccggtcgtgcattgtggaagcattcgaacgggcgcgcaaaaagttgatcccggaagaggagcccatccaagacgtctccacgaccacaaacctcgaacccaataaataagaaggtgctataattgacaatggaaaccggaagtcgtccgacttacggggaaaggctgtgaccattaagagggattataccaaaatcaaacgagaaaaaaatcgaaaaatataaaatccattccggactaggcgcaacccagcctattagtggaccgggaagacggcacttccggtcgcaagcacaagcagattccggaacaaatggaatgcaaataaacactgtcgaaagcaggcaaataacgcagaaagactaaaactaaggaacggttgtatagtagttagaaacgatgcgcttcgaggcattgtgggaacttccggccaagaccccggaagccgagaagggatatgtggaatcgaagcgttcgcagtattttttcgagtcaatgtcgataccagagaaatttattatgaataacagttagataacctattcacgttacgcgtatttttagaaaccaatcagttcaaaacgctttgtaaactcacattttatgctggaaataaaataacgtatgcttttaggtagcgctagtgctactgaaaaattcaagttttgtttcgtttggaattgtgaaatacatataatgattcggtacaaaccttgatagagtccaactgcttaaactggaaaaaactacaagtcaccaactcaaaacaaatttaaaaaattctttcgatcactattctcaaattttgaaacaacacggaccggaaacatcaatgcaaaacaaccatatcaaatggaaatgccttcacagcaacacatcgaccctcgaggcgaggtgtcaagcttaaggtcgaatcttattcgagtcgaaaaggatgtattgcgctctatgcaaggaaaatcgacggatcgagattttactaaa

SEQ ID NO: 1044 - DNA, 2089 bp, Aedes aegypti
gtttgatttggtctgtggaagaagcaacaacggaaaagcatgtgctacgcaagcaaagtaataaagccgcacatgaaattaatgagcagcgtggcaagtggaaaggctcgaccttttcaagatcttccgggtcctagacgattcccatttcttggaacaattaatgatatcattcatttaggaaaccctaaaacgctacatttaacgatatccaagcatcatataaaatatggaccattgtttaaaattcaaattgggaatgttaatgccgttttcataaaggatcctgacatgatgagaagtgtgtttgcatacgagggtaaatttccaaaacaccctctgccggaagcgtggacttattttaatgaaaaacgaaaatgcaaacggggcttattttttatggatgatgaagagtggttgcattatcgtaaactgcttaatcaaccattgttgcgcaatacaagctggatgattggaccaattaaacgagtgagcgacaatacaatcaagagcttaccacataacgcaaaacatagtgattgtaaagaaaagcgatttgaactgcacaatgtagagtctgtattgtacaaatggtcaattgaagttctgctcagtgtgatgctcggaagctcatataatgaaattaatgcaatcaaattaaacgaattagtcgaacagttctctcgaactgtgtaccaaatcttcatgtacagttcgaagctgatggccgttcctcctgaaatagccgatcgtctgcagctagatgcatggaaacaatttgaaaggatagtgccagaatccctcgccattgctaataaaataatcgacatatctatagatgacattgaacgtggtgatggacttctatcaaaattggaagactgcatcccctctcgagatagtataaaacgaattttctcagactttatcatcgctgcaggagatacgactgcatttgccacattgtggtgcttgtatcttctagccaaaaatcaagctgttcaaacaatggtacgagacgaaaccaagcatgattttctagaatcaccgcttattcgtgcaacagtgaaggaatctctccgtctgttccctattgctccattcattggacgctttttggctactgatgctattattggtgactactgcattgcaaaaaatactcttgcattgctatcgttatactctgctggcagagacgaggtaaacttttacttgccgaacgaatttcttccgcaaaggtggttacgaagggacgataaaaaccaatcgattataccgttcaatgccaatgctagtttaccattcgctattggaagtaggagttgcatagggcgcaaagttgcattgattcaaatgcaatatttactgtcaaagatactgaatgaataccgtttgacagtattgaatgatgaagaagtcgatgctgaacttaaattggtaacagttcctaataaaaaggttaagctcgcatttcataaacttcaatagtgatagtgataattactgacacatagtaaacagatttgcaaatgtatgtaaaataaacgaaggattgtagttttttttgtttgtgcctttgtcatactacatgcgaatgcggaaatggcaactttggcaaagaaggctcacaggtggactgtgaaagagctcatcgaacactaagctgagacgcaggctctgtcccagtgagggcgttatgtcaagaagaagaagaagaagtgtaagtgtgttaccatttactttgttttccttacatcattttgaaattggacgtctgttctctacggcgtaaaatttccaaaaacgcacatttgcccaaaattccacgcggtggtcatggctcatataagaatgaagtaaaattcttcgggaaacgccgcatgcaattttgagcaaacgcgttaatatggtcaatgattctaaaaactgcgcgatagtttgtatctagttaagcaaatgttttgtaagtttttagttttcagtataagcttgatattgccaaaacattagcaaaactgtcttaggaaaatcttagttgtatgtaagtataaattatataaagtaaatacatcgttacattggttgc

SEQ ID NO: 1045 - DNA, 1253 bp, Aedes aegypti
taagagaatttcgagtaaagttatttgcttaatttggccgagtttagtcgtaaatatataagttataacaaataagagccatgagtatcagcaacaaaatgtttgccgttagtaggaagatgttatcggtgagcatgcaacaaaattcaagtaagtctcctctcccatcgaaccacgactagtatcgacagcatgttttcctacttcaggatttttctccgttgcttcgaggcttcagagcactgccagccaattattcacccaggaacagcttcgccagaaggaaatggttggccgcatagagaagatagagattcgatacattggaacccccaaagatacgaccctagtgatgaatcgaggactgtccacaccgcacgactgtgccaagcacattggcgagaagtactgtcgattctccgcactggccctcctggacaacaatacagcatgggatatgcgaagacctttggaagaatcctgtacacttcaactcctgaactttacttcggcggatccgcatttagttaacaaagcatgttggagaacttgttcgttccttctgggatcggtgctacacaaaagcttcaaggatgaagctggtctcttcctgcacagttttccgaagccaaatgttaaaacgggcagcttcgttcacgacatcgccctatctaaaaacggttggaagccaacgagccaagagctgcgtgctctgtcgatagagatgatcaaactgtcccagcaagatcttcccattgaacgtctagacgtgaccagcgaagtagctcagcaaatgttcagcgataatccatataagcgtgagcagattccaagcatatctagtcagaacaatggattgataacggtctatcgagtgggagatcacgtggacatcagtaaaggacccatggtcagttcaaccggcttggttggaaaatgtacaattgctgcaatacacgaagtacccaagtcgagtgcggacaaactttcgctctatcgagtacagggtgtggcacttcctattggattgaacttgaatcactttgcctatggtattttggaggatcgcgctaaaaaactgaatcccgcaaagctgccaaatgaaccatatgaagaagtcgcagctgaacaagtagcatagaaggcaatattggggagcattactatccttgaataaagatcaattttgtcattcacaaactgtaactattacatctttataattcagtgataaatcctatatttctgcacgg

SEQ ID NO: 1046 - DNA, 2322 bp, Aedes aegypti
atgcgatcatacacgccggaggaatatactcacgaaagcccggtgtccgggggacagaggtacacatcacccaaggcgggtggcggactgtaccaaccagatgcgtactatgacgcgccgggtggttcctggtatccctcatcgtccagcggtgcttacgcgcctcattcggcaggttccgcatatcacaacgtaggccacggagcgcacctcggtggaccccagcatagccatgaacagtacgcaatgtcgccggtcggcgttccccacatggatggacatctaagccaaaatcaaacacaagcacttccaccgatgagcacgttccggggaaacaccgcccagataccgccaattggaccccagggacagaactcacccgcaatctacaacgcaatcgcaggacatcacaatcagcatgcacagcatagtccaattgtacaaaatgacaccctcgtcggcaatgcactgaaaacgatgtaccccactgatcagagtattagcagttacggttcaaacccaacgacaccagtgaactcacctcctccactaacatcacagcagcaagcggcagcagccgccgccgcagccgcagccctcgcccaacagcagtcttctgcggccgcgagtatacacggctccggagcgacggccggttcgtccagcggcggtgcaggttcctcagccacgacgtcctccgcggcagctgcggcagcggcagcagcagcaggcacccgcatggaggaacgcttggacgacgccatcaacatcctgcggaatcactgcgaaccgcaggtcggtgtgtcgctctcttcgatcgatgccggttcgccgtacggtccggccggggcctcgatcattccacctggcacttccggcggtggttcctcctcatcacagctgcacggccaagactcgaccagtgatctaccagtgacggcggcggcggccgtggcagccggcctagtaccagtgaaaaccgaaagattacccagcacaccggtcgcgatgaacagtattgagttgaagtttactgacgtgtctcactcttgtattgcagagaaacgcaaagaaccgccagattcagataccaaacccagcagttccgtaccaggttccaccaagggtgccaagcggcagcgtaaatataaaaattcacgtagttgttccagtgctgacgatgacgacgacgacgatgatatcgatcccctgacgaaggatcgaaaggagaaggaacgaagacaggccaacaatgcccgcgaaagaatacgtatccgggatatcaacgaagcactgaaagaactgggccgcatgtgcatgtcgcatctaaagtccgacaaaccacaaaccaaactcggcatactgaacatggccgtggaggtgatcatgacgctcgaacagcaagttcgggaacgcaatctgaacccaaaagccgcctgcttaaagcggcgagaggaggaaaaagccgaagacggccccaaactgccccctcacatactacaccaaacgccgtacccctcactacccgtaagtaacctcaagcaagaacgagagtgagagcactgagaacgcgcgtgtcgtgccgtggcatctataactagcaaaaaataatgaacaaaatcgcaatcggtacttcaaaattcaaacccatacccgcttaattcggctgatgtatgtgagcgaaacaatcgaaagttatcgtacgccaaatgatcgagcgtggcccgccgccaaatcttccccacaaccccgggccaccacaatagcataataactttaataaccttattcgaagataacactgcaagcagcatacatgtacatatactagagcagcgggaaccgttgcaacagccgcagccaccgcagcttcttcagcagtagaagaagcaacagcagcagcagtgacaaaatcaacagtagtgggtgaatcgtgtgagtgctggacgggtgccgattggtggatgtggttgtaagcgggaagagtgattgaatgggtgatcagaatgtgaggaaggtttgtgacactgatctggaaatgggaacgaaatattgcgctatccttttaagtagctgtctgtattgtcaatcggaacgagtaacggattttagaggagaggtagatcgaacgattcgggaggttaaggaattgatcggggagatcgggaacagactagaattggagaaacatacgccgcgaacccttcctcgtcatgagttcagtaaaacaactagagagtgctaggtattgaaagttagagaagcttatttttattgttaatgaaggaattataacatcacatcgatcagactgtgtttcac

SEQ ID NO: 1047 - DNA, 2040 bp, Aedes aegypti; identical to SEQ ID NO: 521

SEQ ID NO: 1048 - DNA, 1693 bp, Aedes aegypti
gataactcaacgttacacacgtcatgttggaccctttcctgctggcagccttcgctgccgttatcttcctggtataccacctcctcaaccgcaagtaccaattcttcgccgaacgtggaataccgtacgtgaaaccgacgctcctcctgggaaatggggcctctgtgttgctcaaaaaagaagacctactgcagaacatccagcgaacgtacgatacattcccaaatgccaaaatcatgggcatattcgacttcgtcaaacctataatgatgatccgcgatccggacgcgatcaagcaaatcggtgtcaaggactttgatcacttcgtcgatcacacgccactgttcacgccggccgattgtgaagacgtgggaacgaacagcctgttcggaaactcgctgtttgccctccggggacagaagtggcgagatatgcgagcaactctgagtccggccttcaccggaagcaagatgcggcacatgttcgagttggtgctggattgtgctcgatctacggcggagtacttccgcgaggaggccaaatccggtcgaacgaccgagtacgaaatgaaaaacgtattctcccggttcagcacggacgtgatcggatcggtggcgttcggtatcaaggtcgattcgctgcgcgaacaggacaatgacttcttcgttaaggggaaggcgatgttgaacttccagaatttgaagagcttgttgaaggtgatcatgctccgatcggcaccgggtttgatgaatcggctcaatgtggatattacaagtcctcagatgaacgcgtacttcaaggatatgatcatggacaacatgaagcaacgggagattaacggaatagttcgaaacgacatgattaacattttgatgcaggtccagaagggtgctttgctgcatcagaaggacgaacaggacacaaaggatgccggctttgccactgttgaggagtccagcgttggcaaagcgctccataatcgagtttggtccgagaacgaactcgtcgctcagtgtttcctgtttttcctggctggcttcgacacggtttctacctgtttgaccttcgtaagctacgagctgctggccaatcctgatgttcaacaaaaactgtttgaagagattatggccgtcgaggcctctctggacggcaaaccgctgtcctatgaagttctccagaagatgcaatatctggatcagatcatctcggaaacgttacgcctctggcctccggctccgttcgtggaccgatactgcgtcaaagattacctcttcgacgacggccaggggactcgggttccgattgaaaagggtcaaattgtttggttcccgatcacggctctccaccacgatgccaagtacttccccgagccgaaccgctttgatccggagcgattcagcgaacagaaccgtcccaagattaatccgggtgcgtatctaccgttcggagtcggtccacggaactgtatcgggtcgcggtttgcgctgatggaggtcaaggctatcgtgtaccacctggtgaagaactttacgctggagcggagtgggaagtctcgggttccgttgaagctggagaagagctacattgcgatgatcgtggagggtggcatgtggttggagttcagacctcgggcgtgatgggaagggggttcaatagtaataaagagtaacaaaatgtgtcattgttttagtat

SEQ ID NO: 1049 - DNA, 2801 bp, Aedes aegypti
gtcagtagtattgcggctcgccgtccaatttcaaaaagtgctccgcgtggcacgctttgcaatcccccgcactaatctatcgagacgttcgtccgacggacgaagggaactgcccggctgcattgagactaaatcaagattagtttcgaacgcgattagaatcgatgaacaagtaaaggtgcaagctcaaccgcggcaagatttttgtggtgcgtgcgtttcggggactgttgcgttgctaagggctgctggatcgctctgcatttctagtaacaagctgtgcttatccggggattaggttgctgtacgatgcaaacagtgaaaagctccgagaaacccgatccggaagttgtcggcagcagcagtagcagtacaccggccgccgccacgatgcagcaatccacgcgaaccgagatgcgcccggtcaagtaccactacgcggactcgttctggtgcacctatttgatctcggtgttcgcagccagtattgccgaaacggtcacgtacccgctggacctcaccaagacccggctgcagatccagggcgaagccacagccgtaaccggtgcaatcaagaagctcaaatatcgcggaatgctagcaaccgctagtggtattattcgcgaagaaggagctctcaagctatggcaaggcgtaacaccggctctctatcgtcacattgtttacagtggagtccgcatcgtcacgtacgataatctacggaagaaacttcgcaacggcaacaacgactttgcactgtggcaatcggccctggctggggttggagccggtggtttggcccagtggctagcctctccggccgatttggtcaaggtgcacatccaaatggagggcaaacgtcgcttgttgggtttggaaccgcgcgttcatggagcggcccatgcattccgggaaattgtaagccgcggaggaatcgccggcctgtggaagggtagcgttccgaacgttcaacgggcagctttggtcaacctgggtgatttgaccacgtacgatacggttaagcggttcgtgatgaagaaatccggactgcccgattgccatttggtgcacattatttcttcgatttgcgcagggctggtcgcggccacgatgggcacccctgccgatgtagtcaagactcgtgtgatgaatcaaccaacggatataaatggaaagggactgctctacaaaggatcgctggattgtctacagcaaaccattggaaaggaagggttctttgcgctgtacaaaggatttctcccagtttggatccgcatggcgccttggtcacttactttttggctttctttcgagcagatccgcactagtctgggtgctggtggttactaggccgtgtcagtatcagacaggcgtttgataggttctacaactgttagtaagtataattttatcaacatttgaagcgcaatctgctctttcattgtccgattgggacgcaattcatagttcagtcgcacacgtaattcactcgatttgagatagaaggcacaaatgtacagttctatttagcacaatgcagtttttcaattacgagcccaatttgaacgaattaaacaaaaatatacgaaaaagcagaacaaaattatatctactgaagagtgccatcgaaattaaagagcttcggattatcctttttgagcatacaaagttcttctttgttctctaacactggattagttgtatactgaaaccactaggctaaaacatatcctttgcgtgagactatttactctatcggaatcatacgttggttgagggaggactataattttgatctgtgatttagtcgatagtagccactaggtttaagcgtacattcaaccaactaagttagattgattttggtaccggaggtagttcacgctcggaagctgcagcggcggcttatgcttctcatcagaaattcacacattctctcaaagcaaccatctcggatttagtcacgcgtcatcacagtcagtcaaataacaccaatgaaacatttgacaagacgcaaacaacgcctcagggaagcctttttcaactaaccaacctgtcgccctttggtgcaactttaattgtgccctgggtcccatcttgaattctcccacgacagaagttcatccattatccaaccattttcgaatatagggtaccacctttgcgaagagacttaaaaaacgataccttcaattgtaacatttgtttgactacttatcgtttctaattaagtaacagacactatggacaagtgatcattctctgcgtgtaacaagccacgaaagagaaaacttctcatctagaccgccttgttctacacataatgatgcttaatactatacatccgtaggataacctgctacctataatcgacacgtgacaataccaaattttatcatgttcccatttccgaaagaatcgtagttcatcctcaaaagcgaataaaatagaaaaaaaaagattccattctggtacaacgataagaagcactgacgaaacagacgaattatgcatcatgaccacagactggccaagtagaaggtgcagtcgctctgttacgtccctaaacttaaaataatttctagtgttatacaacctactaactgcaaaccacatacccaatcccccaataatgatcaaaagacacgatctggcaggaagctcgctaaactgtatttgtctttgggaaaggttcgtcccgctgttaggaagttgtgtatttgtcgttttgcaggttcagaaaccaatgctcatgtgtaggcgaaaagtgtgtttgaatgaataaacattttcgataagca

SEQ ID NO: 1050 - DNA, 779 bp, Aedes aegypti; identical to SEQ ID NO: 531

SEQ ID NO: 1051 - DNA, 1399 bp, Aedes aegypti
aaaaaaggacaaaaaaaagtgcgatcgtcgtcctgaactggtcgtccctcagttctgaacgtcgtttattcctgcattagcattccacgaaccaaggcaaaagtgtgtgtcgagtgaaaactgggaggagtcgcatcacaaattcatagatcatcctttagtggctcgaaatccagtagtgctgtgttgacacaactctaacagcattgttaacttccattccttgagtgagaagcgtttccatattccgaacaaagcaatggcagagataaagccggaactcggggaaatcgacagcgatgctgaacagaactattccctcggcagtaacgttgatccgaagaacatgcaagagttgaccatctacgttcagaatctcctccagaatgtgcaggataagttccagaccatgtcggaccagattatctcccgcatcgacgacatgggcactaggatagacgacctcgagaagagcattgccgatctgatgcaacaagccggcgttgaaggtgccgagaagtgaggactgccaggattcggatgggaacaaaagatttatcgcaagcatgatttagtttcgggataagtttccctctcgtcccgtatcagaacgtgtgacagtgtcatatttgcgaaaaaaccaagtttttctgctggttagggtatcacggtgtgtcttgaaccgttgttaacgaataaaatggccatcaatcagtatcgaccattcgaaagatatggtatccagtgatttaaagatagagggccattttcaaaataaatatttctatgttggataaaatatatttactgcatcatttattttttcagaattaatcaaaccatcaagttcacattcaaaagttgtggtatcttagcatcttccttgtaaattgaagacatttcgttgacggaatcaaaataaccatgataatttaatgattccacaaacggaatgtcttcaaaaacacaagggagatgtttagataccacatttttattgttgaatgtgacctgatgataaattaataaataatatttatgatagcgtgtgggattttttttttatcaaacatgtaaatatcccttgaaaatggttttgaaatcttcaaatcgctgtaacttgtgaaaatgttagaatctacgaagagtatgcttggataccatatctttcgaatggtgagtgcagaattgatggttattttatttcgtcagtaaagcttttagacacaccgcgggtatgattgggagtcatggcattatcgacaaaattcatccattagttttattgaatccaccttatacaaaaaacgaagggaggaagagatcacacaatcaaacaatcggtacgaagtaagccaaaaagcaaggatacaaatttaaatatagagcacgcagtaat

SEQ ID NO: 1052 - DNA, 3211 bp, Aedes aegypti
atgtttcgtcggacgtttacggtgtcgtattccccctttcggaacaactacgtaacacttccggacaactaccatcggatgctgtccagctacaaaaacggctgtttgagcatcacgcacggtatcgatagcttcttcatgtcgtggtcgccattcggaggcggcgggtatcaggataatcgcatcggaatcaatgcacaggtggccaccgccatgggactgaaggagggcgacgccgttatggtggccatgatcatagaggcgcgatcgctgaagacagtggaggtgacggcggccagcgaaaaggattgggatatgttgcaagtgagcagcagtcgcattcaatcgattctgttggatcagacgaggatagtgaccaaaggacaaaatttgatcgtgtgggtaaacgattcaattagcatcaagatcaaaatcaaatttaccatacctcctcttccatacggtcgactggaaaacgataccgaactagttgtagagccgtacaaaaaacccatgctcaaaaaagatgcacaaaccgtgccgagtgccttaacgcgcagcaatacaaacttgaacatagcagaactcgtacgaatgcgaaatcagcagcgaagcaaaccgaacggcatcgagaatggagacacactgataagttccgtcgcatcagcccagttcaaaaacaaatcgcagtatctggatgacctggttgccaccctcacccgagaagtcccaaaaagctacgaattccgcgtgatccgaggtgtatggaactgccggcgaaacaattcgcaaatatgcgacatttacatcaccaaggagaacatccccgccggaatggacattcatctgccgtttctcttgtccacaaatgacgatcgggagtactttgtcaacgtgcggcttacttccgacgcggagcgtttcccgagtaacgcctatcccaccgttgaagtcaacgacaagctgatggaacagttggaaatccaccacggggaaaagatcactttacgggcgaaacaaaacgccctaaacattgtggacatgatcgagttgattccggccaccaaggtggcgtccaagatcgagagcgatatcgtggaaaagttcaaggagttcattttgttcaactcgaaagtgcatccggtgttgttgaatcagggtcaggtattccgacttccggagtactatctgacggtgaagttgcaaccgggcaatttgaaatactgcctggtgaatgcggtgattttgaggcagagtaagattctgtgctcgggagaagtgaaaaatttgaatggcgtggttccaagtgaggaagatgagaagaaaaggtgtctcgtggtgggagtagaagatcagaaagtggtgaagatcggaaaattccagaagatcgtggatgattgtgtggatcagttgaagttgaagctgtgccttgatgagaggagcgctgtgaggaagagctacaatgtgatcgtggctggatccaaccagagtggtaaaagaaccatcgtccaaacggtactacgtcgcctagccgaagcaccttatcactgtttcacgaccacgttccaatgctcgaaacacaaagggcgcaaaccggactccatacagaaggatcttcgccacgcattctacatgtgcatgtttcacagcccagcggtgctgtacttggaagggctggacgtcctgacgcacaatcccggtgatcagaacacccaggatgccgagtatcacaataaagtttcggacgtgatacgcaagcagatcgaggagttcaccagcaccaacccgatctcggtgatcgcctccatcagcagtgttgccaatcttaaccggaggctttactcctcgcggggatctcacctgttccatgacctccagaaggtaccaaacctcgacaagactgatagagaaattgtgatcaaaagtttgttcgttaacaaacgctgcaaactagagaagaagatcaactggaagaagctggccaactcaaccgaaggctactcggttgggagcctggtgcagatggttgatcgagcggtattttacgcgttcaagaaaaattccaaatccccactggtgacggatgagatgatcggtagtgccttggatgttaccaacgaatattgcctgcaaggaatcgaaagtcacaagcgctctgatgagccggatgatgaagacgacgttccgggggataaagttccaggcttggaaaacgccatcgatgtcttccaggaggttttgatgtggccgactaaattcccgaagatcttcgagtgttcaccgctgcgcaatcaggcaggcattttgttgttcggacctccgggaacgggcaagacttatttagtttctaagctggcaaaaacgtggaacctccggatgatatcggtaaagggtccggagttgttggcaaagtacatcggtcagagtgaggaaaacgtgcggaatttgtttgatcgagcacgcagtgccaaaccttgtgttctcttcttcgatgaattcgacagtttagcgccccgaagaggacatgactccaccggggttacggatcgtgtggtgaatcaattactcacggaactggatggcgttgaaggtcttcagggggtgactgtgatcggagctacgtccaggcctgaacttctagatccagcactgttgcgatcgggcagaattgatcgattggtggagtgtagtctaccggatgagaaatcgcgtctggcgatcttcaagaaccaaagtagctcattggatctggctgctgatgtgcaactaccacaatttgctaagaaagctaacagctataccggggcagatatccaatccattctgacgaccgccaacatgctagccgttcaggagtgtctcaccagtgccgaggatgatgagcatgttccggagaagataacgattaaccagcgacacctactggaggcattcgcaagcacccgtccctcgctaagcccgcaggatgtgcaaaagtacaaggacacatatgcacgattcacaaacaaagagccgccttcgagggatttcgttgcgaaacgggccaccttggcttaggaaaggcttcgatgtaatttgctcagcgggtctggggtgaattcaaacgatcctttgttgggtttaaggtgtgttaacgcattcgtcttgaattttaggggtttcgggaactaagtggtggtttttataaaagacatgaaactatttctagaac

SEQ ID NO: 1053 - DNA, 1639 bp, Aedes aegypti
atggccgtggtccgggccggaacaacggaactagacgatgggcggcgggacaattccggggtgatgtgttggcgggaattcgcttgcggatggggagcagcctttgtcaacatcaccgttacctatcccatctacaagatgatattccgacagatgctgcacggagtgcaactgaatcaagctttcggtcagatacgtagcgagggcattacctatctgtatcgggggatcttcccgccgttggcgcagaaaacgatttccctgtcgcttatgttcggagtgtacgatgggaccaagcgcccgttggttaactgtttcggaattaatgaatatgcggccaaatcgatcgctgctgtggcggcaggttccgtggaagcggtgctaatgccattcgaaagggtgcagactctgctggccgatgcgacgtaccatcagaagtacaggaatactcaccacgcgtttagactgatcatccttgagcagggcttcaaggagctgtatcgtggcttagtcccgatcctgtggcgaaacggaccctccaatgccatgttcttcataatgcgagaggaagcggacgtacggctgcccaaaaggaacacagtggtcgcacagcgaacccaggaattcttgtccggagcctgcataggagggtttatcagctccgtgttctaccccatcaacgtgctcaaagtgacgatgcagagtcgaatagggggtccatacgatagcatgtgggttgctctgcgacaagtatacaacgaacgggatcgtaagctacgcaacgtctacaagggcgtaagtatgaactgtaccagggcatttttcagttggggcatcgtgaacagtgcgtacgagcagctaaaaaaggtcttctactgatcagtgatcagcagggaacccgatgaatgtcggcggccgacagcgacgacaataaagaaaactcctaaggtttatatttttcgatgggaaagtcgattgtgatgtaaataggtgtacctagtagcatgatctttggacgatttttagacaaaacgaaaaaaaaagtgttattagttcgattgaggtagcaaaattgtagtatttctagtctagggcaaacactaaaaaatacgatttgaacaaaagttctatctcatatggaccacgaacacactcacattacagacaaacacacgcacgctggagaatggaacttttattctcgtcatgtactcttagggatgaacactagttagctcaaatctcccattttatcggagctaatatatccagattctcgttcttgttcgtttgttgaaacccagaatgagccagttgcatttaaatgtgcttgaactcacattgtcgtcccactagagccaatttagtccttcactcagtgatcgttcccaaggtaaagtttttctctccctgtaaatatatgtccctaccattcgatatagtgtaaatataaatctaggctacaaacaatcaaatcgagctaatcacaatgaatgcggcggttttggccgcaaggaaaattgtattgtgggaagtacccgtaaggtgctaaaatcaaatcgttagatctatctgttttacctagccgaaagagaaaaaaagaaagcacatacgattacgatgaatatttctcgcaatg

SEQ ID NO: 1054 - DNA, 2430 bp, Aedes aegypti
agctgagaagcagactttgtcgcagtgaggacgtaactccaataataagaaataaggtgcagaattgatggtaatttttcccgttcataacggtgccaaacacaccgcggttgcattttcccggagctggtggggaaccataagggagcaaacatgaacgcttagcttattcagcaccacagcttggtaacttagttcagcgcgaaccaccgtcgacttgagaccataaagctacaatcgggtgtttgtactgcactgtactgtacggcctcctcctcccagtgcagttcggataaactgtttttcattgcggtgctagtttgtagcaacgcacggtagcattctagtttgcgcaaaatggaacgcatcagtgatattggcgctacgccttacgaaccggccccacgtggagagtccctgaggaagctacgcaacggaggccgaagcagtggtctggaatcgttgaagtttgctctgtcgattgtgctggactgtttgacgtttgtggtgctggtgattcccattttggtccgatatgcggtcggtctgttcgtgtcaccgcagaagaaaaagattgccggacagttggcactggtgaccggtggtgccaacggactggggcgggaaatttgcctgcagctggccaaggagggctgccacattgcggttaacgatctggatgccaccaacggggccaagacggttgacgatctgaagaagatgggtgtcaaggcgaagtttttcaaggcggacatttccaactatgatgccgtgcagggactccgcaaagaaatcgagagcagtttgggacccgtcgacatactggtcaacaatgccggggtgctaccgttgatgtcgcttcgtgaaggaaagcctgaagacattcagaaggtgctggaaattaatctgctgtcgcatttctggacgctgcgtgcatttatcgaaggtatgattactcgacgctcgggccatatcgtggctatagcttccgccacttcctatctgccagttggacgtctggtgtcgtatgttgcttccaagtacggagtccgcggcctcatggaagcgctcaacgatgagatgtactttgacgggcttcagaacgagattcacaccaccaccgtgttcccgtgcttcatgaatacacgcaaagaagttattaataccttgcagaaattggatattctatcgaggatgccaattttttcgaccaagagaacagcccgtgctattgtcagtggcatgcttcggaaccaacgccacgtgttcatgcccaaatatgtaggaccgttcctgacacactatgaaactattccagtggaaatcagaagagtagctacaaagttgttgctgcaaaacaaaggggttcctaagttgatggactaagaaatttttatcgatatatatttgctttagtttgactgaatctatagttaggtgcaagttttacaaactagaatatgattttctgaacatcactgtgattgtacctcaaaatatattctcacaaataaaaaaaaaacatagttaaatattgtaaagaaaactgtttcttggattgcattgttttgactagttcttagaagatttgtaaaactttagtttttttcacattctagaccatccgtacattcatcgatgggatgattgaacgccgtatgggtcacattgttgcagttgcttctgtagcatgtaagtatagacaatgaaaaaatgtaattttcttgctctcaatgttcattggcatttttattgaagcttacctcccgcaaggccgaatgatatcctacgttgcctcgaaatatggacttcgtggcatgatggaagcctttagtgacgagctttactatgaaggactatcggatcagataaaaacgacaatcactttcccatttttcatgcccactcgaaaggaattgattgatatgctttgtaaattgaaaattatcgctagagtgccaatttttgcaccggagaaaatggcacgtcgaaccgtcaatggaattctctgcaacagtcgacaagtatttttgccgaaaattttcggcttcggattgaaggagtacgaattcattccaaacgacgtgaaacgattgggacggaagctggtgttccaaagtgacattccacgattgatgccgttgccttcacagttcaatatggggtgattctcatgtaacgggcataattggacctccgacgatgggcataatttgatctccgattggtctaaattcgtatcggtcaattgctactttgaatcagtaaaaagaaggaaatttgttttataactttttatacagtaaaacaaatactcactgtgttccacaaaagctacatttttgtggtttagcattaccaattgtaaaataagcagtacctggaaagagaagaataattatgttactagaaataattgttattaaaaat

SEQ ID NO: 1055 - DNA, 588 bp, Aedes aegypti
atggttctcctaccgaccattctgttcagtgatttgtgggatggctgcctggacagtcccatccgatcatcccaaatcagatgccaacacctcgacagacaaccgtttcctggaggttttctggtaacgttcgacgacgcgcccaaaaagtgtgatcgaaagccatgctgtcgaactccaagccagcgcaaaaacgaaggaaacaagcaagaaacagcggataaagcacccgtgaacttccaggtcagtttgaatgtccaggaattccagccggaagatatatcggtgaaggcaaccagtcagttcgttattgtggaagcaaagcacgaggagaaggatgctgaaaatggttacgtgttgagacagtttgttcgtcgataccgacttccggaagggcacgatagcgacaggatagaatcgactctatcgtccgatggagtgctaacgatttctgcgccagttttggcactccccgcaccggagaaggaacattcagtgatggttaaccgtgtaaaaatatctacagcagacgagaaacaatgcactaaggagaataaaaattttactctcgaggatctggatgaatag

SEQ ID NO: 1056 - DNA, 2192 bp, Aedes aegypti
gcgacgccggtaaagcgctcgctctccagcttgaccaatacggttagcgacgtttcgcgccttcagcggtacgcgcctataggtagctagagaggatcgcgctcggtctggtcgagccttaaaatggttcgattcgccggtttcgagcttcagtacacggttcagttcctgctgcgttgtgctgtccggtcaattagaatagtgtaagagccaggcgaggaagcaatactagcaagctacataagcagagtacaacacgctgctgagtcctgccttggacaaagtcgtcgcttgatcattgtcacgatcagtcacaaagcgcaaagcaggaaaataccctctgcctccgagagatcaggaaaaattttacgcgagtgaaggcgggtaaggtgatcgagcaacggagaaacactgttttttgtcgggtcaagaagggtgctgttgctgaatcgtgttgtgtagaagacagtcgtgaaggaagtgtcgaccggtgaacgtcgttgaagtgttccttagaggggcaagtgtttgagaaataaattaaaaatattacgacaagcgagtggcggaaccgcagactgaagatcgtgtgggtgcgttaccgaaagttagtgaggcggggaaaatagtgatctgtctgttgttatggttgatgcgccaattgaaagtgacgacgttgagtaagagaattcggccatccagctcttctacgcggcggaggcctgtcctcattcgtcgagcagcgatcgtttaggcaggacctacaacgaccttctggcaattgcgtcttatccgtgtggccaatataatagtcagtgtctgaaaaacagtgccaactttttgttttctgtttgtgtgtttcgtcttgtgaagaagcccgggccaattactagccaaaacactttcgttcgacttggttcaaaaagaagcgttgcatccaacgtagaccagaggcaaccgatcatcagccatcgtcgtcagaacacgccatcatgaacaagcagtttccaaaacgccaagaaccgccccaggcctcggtggcggtcaagctgctgacagccggaacggccgcgtgctgggccgatttcatcacattcccgcttgacaccgccaaagtgcgattgcaagtccagggcgaacaaccggctcgcacagcccccctgacgcagacggccaccgccagaggcgccacagcctaccaggcattcaaattgaacccatcggccatccaggccattcccggagcgcagcatgtccagtaccgtggtctagtgggaaccatcacaaccatcacccggcaggagggcttccgcacactgtacaatggcttgtcggcgggactgcagcgacagatgtgcttctcgtcgatcagactgggcttgtatgatacggttaaggaattctacggaactatcttcaaagaaaacgaagcgggtcttcaaatcatcactcgaatctgtgccggcctgacgaccggtggcctagcggtagcgctagcccatccgaccgacgtggtcaaggtgcgcttccaggcggcctcccgctcgaacagcaaccgtcggtatacttccacgctgcaagcataccggacgatacaccgcgaggaaggtgttcgagggctgtggaagggcgcgataccgaacattggacgcaatgccatcgttaatgtgtcggagatcgtgtgctacgacgtggtcaaggattgcctccagcggtacgcaaacatcccgaacgacattcggttacactttagttcggcggtggtggccggatttgccgccactgtggttgcctcccctgtcgatgtggtcaagactcggtacatgaactcgcccaagggtcagtaccggggagcgctcgactgtgccatcaagatgggccgccaggagggagcggccgcgttctacaaaggttttgtgccatcgtttgctcggcttgtctcgtggaacgttgtcatgtggataacgtacgagcagttgaagatgattgtgtttaaatcttaatggggtggaacgctgctttaaggatattataagttatttttacacttttttaacatagactggacacttagagagtcgtatattttttatattttatgactatgaagaatattgtgatgtatcaaaagagaaaaaaaacgaatattgtaaacgtgaataatttctataaagagtatattttgacaaacg

SEQ ID NO: 1057 - DNA, 3922 bp, Aedes aegypti
atggcgcgggccacaagtcccctggaagaaataacgttcaccatcaatggaaaggcacacactgttaatgcaaaaactgtcccggttgacacctcgctgaataccttcattcgtaaccatgcccatctcagcgggactaagttcatgtgcctggaaggaggatgcggtgcttgtgtggtcaacgtgaatggcgtccatcccgtaaccaaagagaaagcttcttgggctgtcaactcgtgcctattcccggttttctcctgtcatgggatggatattctaacgatcgaaggaattggcgggaaaaaagatggttaccatccagcacagcagcgattggctcactttaatggaacccagtgcgggtattgctccccgggaatggtcatgaacatgtacagtttgctcgaggcgaagaagggtcaagtttcgatgaaggagatcgagaactcctttggcggaaacatttgtcggtgcaccggatatcgcccaattcttgatgctttcaagtcactggcggtagatgcggacgagaagttggtgaaggcttgtcaggatatagaagatctgcagaaggtttgccccaaaacgggtactgcatgcgcgggaaaatgttcaccgggtgaacctaaagtagtcagcaagcaaccggttcgaatggtgtttgataataaaagcgagtggcataaggtttacaatatgaacgatatatttgccatttttgatcaaattggagagaagccatgcatgcttgttgctggaaatactgctcacggagtttaccgacgtaacgacaatcttcaagttttcatcgatgtcaacgcagtcgatgagctgcatgctcatactctgggaaacgaattggttgtcggtggaagcgtatctctaaccgaattcatggatatacttacggatgctgccaacaaaaataacaaattcagctactgcaaggaactagtgaaacacatcgacctgattgcgaacgttccagtgcgtaactcgggaacgattgcgggaaatctcagtatcaaaaatcaacaccacgagtttccatcggatatctacttgattttggaagctgcttgtgcaatgctgacaattgctgaaaacggtagtaaaacgagtactgtcagtccaatggatttcgtacacatggacatgaaaaagaaggtgattaaaaacgtgattctcccggcgatggatcctgctgtgcacttcttccgatcattcaaaatcatgcctcgggcgcaaaatgcccacgcctacgtaaatggtgcattcctcataaaaactagtgccaacttggatagcgtcgaactggctcgaatttgttttggcggaatcaatcctgacttcacccatgccgtgaatacagaaaagttgttggtaggcaaaaatctgttcatcaatgatacaatccaagctgccatcaacaccttaactaccgaactggacccggattggattttaccagatgcttctgtagaatatcggaagaatctagctatttccttgttttacaaattcacactcgcaatcatacctgaaggtcaatacagtcttaaaccggagtacaaatctggtggaactctcatggagcgcccactttcatcgggaaaacagaccttcgataccatcgaaaaaaattggccgttaaccaagaacattcccaagattgaggctttggctcaaactgctggagaagcgaagtatgccaatgaccttacaccgcaacctggtgagctctacgctgcgttcgttttggctacacaagctcattctagaatcgctaaaatggatgcatctgatgctctgaaaatgcccggcgttgtagctttctttgctgcaaaggatattcctgggatcaataattatatgccagctggactaggcaatcaagatgttgaagaaatcctgtgcagtggagatgttcaattccacagtcaaccatcaggtatcatagtagcagaaacgttcaaccaagcccagaaggcagccaaggccgttgttataacatacgagaagaaaagtaatcggccactgtatccgactctgaagtcggtcatggacgttgacgctcgggatcgtttctatgacatgtctttcgacaagaaaggaaaaggatatagagtagctcaggcagcaacggctaccaaaaatatcaagggacgtttcgaactagccggacaataccactacacaatggaaacgcaaacatgtgtttgtgttccgattgaggatggtatggatgtttacagttccacacaatggatggatttgacgcaagtggcgatcgctgaatcaattaaagttcctcaaaacagtctcaatatgtacgttcgtcgcttaggtggaggatatggtgccaaaatttccagagcaacgcatatcgcttgtgcttgtgctctggctgctcattcattgcagagacccgtacggtttgttcttccaatcgaaaccaatatgtccgctattggcaaacgctatggttgtatcagtgattatgacgtagatgtagagaaaaacggtaaaattacaaagatgaacaaccactatgtacaggactatggagtatcgttgaacgaatcggtacaaagtgccactaccgagttcttcaaaaactgctacgatgcaaagacatggaaaattgttggcaaagctgtgaagacagatgcccccagcaacacgtggtgtcgagcaccaggaacaactgaaggagtcgcaatgatcgaaaacattatggagcatatcgcgcacgaaaccggacaggatcccttggaagttcgtatagcaaacatggctgctgataataagatgaaaacattgatgccacagtttagaagtgacgtaaagtacgatgaccgtaaacgtgctattgacgagttcaacgctaacaaccgttggaagaaacgtggaatcgccgtagtaccaatgcagtattggttggactattttgggcaattgaacgctattgtatcagtttatgctggagatggcacagtgtcggtcactcatggtggtatcgaaatgggacagggtatgaatacaaaggtagcacaagttacagcgtatgtcttgggaattccactggaaaaggtttgtgtaaaaccgtctacgagtatgacatcgccaaacgcaatagttacgggtggcagcatgaccagtgaggctgtttgcttcgcggtcaaaaaagcttgtgagacgctgttgcaacgtatgaaaccggttcgcgatgaaaatcctggtgctccatgggagatgatcgctaagctatcttacgtaaagaacatcgatttatgctcggaagctcaatacaaagcccaggatattaaagcttattacatctggggtctcagttgtgctgaagtggaggctgacatcctcactggaaacgtacaagttacgcgggtagatattctggaggacacgggagaaagtatcagccccggtatcgacgtgggccaaatcgaaggtgcttttgtgatgggcataggatattatttgaccgaggcgctcgtctacgataacgaatccggtgctctcctaacgaatcgcacgtggacttacaagccaccaggtgctaaagatattcccattgattttcgcgtcaacttcctacgcagtagtgctaatccggctggagttctgcggtccaaagcaaccggtgaaccagctctgaatatgacaatcgtggttctatttgctttgcggtacgccttacgctctgcacggaaagacgctggattaccagataactggattccgatgggaactcctacaactccagatcaggtttatatgttggcgggtaatactaccgagcagtacatgttaaattaggcaatcatgtgatgttttatacaatgtttcaaatattggtgctggaatataagtatttatggtcaataaatataaaatactgtta

SEQ ID NO: 1058 - DNA, 1227 bp, Aedes aegypti
cgtcagtgtagttatcaacaaaccgcatcgcagtgtttgcgagagtgattataaatttggttcatctccgctcgagattgttttgtaaaagaaattcctgtgtctagatagtcatgtccattccgaacgattccctggacgacgacgatctgttggccaatttggatctcccgtcgccaccgaaaaaggcatcgctagtgagtgaaacctccgacgctaccggcagtacatccaccgcaaccgtcgtccgttccgtcaacaaaggcaactgcgtcctggtgaacccgaaacagcgcgggaatcccctactcaaatccatccagaacatcccgtgggagtacgacgacatcgtgccggactatgtggtcggggcaacgtcctgcattctgtacatctcgctgcggtatcacaatctcaacccggactacatccatggccggttgaagcagctgggcaagatgtacgagttgcgggtgctactggtccaggtggacatccaggagccgcacaacgccctgaagcacctgacgcgcatctgtctgctggccgatttgacgctgatgttggcgtggaacgcggaggaagccgggaagatcgtcgagacgtacaagatgttcgagaacaagccgccggatttgatcatggaacgggccgagcagtatccgtatcagaagctcgtgagtgccctgaccaacatcaaaccggtcaacaagacggatgcgatgacgttgatacagaactacggcaccctggccaatatgatcaacagtagcgaggagaaactgtcgctttgttcggggctgggccctcgtaaggcgaaaaaactgcacaagacgttcaatgagaacttcctgaagtcgtgatttacgaaagaatggttatggttaggattattgtataagttgtttataatattgtttcgataaatacatcgctgttctaatcaaatttgcccaccgatatgttcttcgtgttttcacctttgatcattgtaaaaaaatcgccgtttaaaattatcggtaatttcccttcaactcgtatatcatttcgcaaaacgaacacggttcgcggattcttgctactgataggtccatcatgtccgctgattcccaacgttcggaaaagtggagttatttcgtttgcatgttggtcgttcagtatttccttggtggttggaaaatgacctaagggcaccactttttctttatttatttattgtcgtcaatc

SEQ ID NO: 1059 - DNA, 633 bp, Aedes aegypti
atgcgggtagataacaatcccctggaagaaataacgttcaccatcaatggaaaggcacacactgttaatgcaaaaactgtcccggttgacacctcgctgaataccttcattcgtaaccatgcccatctcagcgggactaagttcatgtgcctggaaggaggatgcggtgcttgtgtggtcaacgtgaatggcgtccatcccataaccaaagagaaagcttcttgggctgtcaactcttgcctgttcccggttttctcctgtcatgggatggatattctaacgatcgaaggaattggcgggaaaaaagatggttaccatccagcacagcagcgattggctcactttaatggaacccagtgcgggtattgctccccgggaatggtcatgaacatgtacagtttgctcgaggcgaagaagggtcaagtttcgatgaaggagatcgagaactcctttggcggaaacatttgtcggtgcaccggatatcgcccaattcttgatgctttcaagtcactggcggtagatgcggacgagaagttggtgaaggcttgtcaggatatagaagatctgcagaagtttgccccaaaacgggtactgcatgcgcgggaaaatgttcaccgggtgaacctaaagtag

SEQ ID NO: 1060 - DNA, 1973 bp, Aedes aegypti
ggattgttgaatacaacaatcgtatttgcccacttatcacattacttttcattaacccaaatctaccttatacatttgttttaaatattgaacaaatgacatttgcaaaatttatcttatcaaaatagatttaatcttcatatgccttctctagtccataaaacccgctgcgtttaagaaataccattcataacaatgttgaaactaatagctctaatatctctagctgtttccttttcttggtgtcaagatgtgactcgacccatcattaccacaactggaggacaggtacagggcataacggccagctgtggcctgttctgtagctacttccaattcaatggcataccatacgcggagcctccagtttccgatttgagattccggaatccagtgccacatcgtggatggtcaggagtgcgagatgctagtgaacatggagaaaattgcccatcgctaagtatactcagtgactactcaggcagtgaagattgcttacatatcaatgtgtacacgcagaatttgatcggatctcgaccagttatggtgtggattcatggaggtgccttcgttctaagttctggtgattctaacagatatggaccagaccatttagttcaagagaatgtggtggttgtctctttcaattatcgtctaggcattttaggattcttcagcactggtgacacacatgcacagggcaattggggtgcgaaagactgtgtggaggctctgagatgggttcgcgataatattgcggcttttggtggagatcccaataatgtgacgatctttggtgaaagtgcgggtggtgtgctggtacattatttagttttttctccaatggccactggattattccataaagcaatcggccaatctggtaccgctttggttccctggggattccagtacaacgcacgggaaatggcacgaaacatcgcagatgcattcggttatccgcatgacagtgcagagcttacacgacttctgcgatatactcctattgcagattttattgatcttcaaagatccatcacggacatcccgattcctcgtggatttaaacccttcgagtatgttcccagtgctgaaccagtcaactctccagaacccacatttcttacgcaacgtccaattgaagtactcctttccggtgcatacaatcatgttccaatgatcattggctacacaagtgcagagagcctgtttatggttcgtgagcatcttctggattctactgtatggaacgaattcactcgtaaccctcaattcttcgtccctcacttttggaatattcccgtcaacactccagaatcaaacgcagtcagccaagcattccgcagcttctactggcaggatcgctctcttgggcctgatattatgttggaatggactcaattccacactgatcaacaattcctatatgccgtcgacaaaacagtcgttttgactgccgaacggaacacacaacctacattctactaccagttcagttttgatggtgacctcaatctaatgaaacgaagactcttgctaaccgactttccaggagcagtccatgctgatgaactagcttacctgtggtcgatgacagatctacccatttcacccattctaccaagcaatcctgcaaacatcgttcgacagcgaatggttcgcctttggaccaactttgccatcactggacatccaactccaaattcagacagcaccctgcaaaatattcactgggctccttttgaaggaaataaaatggcgtatctagacatcggagataacctaatagtaactcaaaaccccaaccaagcacgtatcagcctctggcgagatttggaagaacgctatgctaatgatccattcttttatccttattcgtaaaaggtggtaaaagtataataaaaaatagctcataacttatgtaattgttagttttattatttcaattgtgttccattgaaaacataactatt

SEQ ID NO: 1061 - DNA, 1041 bp, Aedes aegypti
gagtgctctcgattgagacagacatcccaaacgtatcaggattgtagcaaatatggaacgttgggctggtaaggtggccgttataaccggagctagttctggcattggtgcagctattgcaaaacagttggccaatgccggtatggtagtaatcggtttggctcgccgagttgaacgcgttgaagaacttaagaagcatctaccggttgaggctgcttcgagattgcatgcgctgaaatgcgacgtatcgaaagaagaatcagtttctagtgcctttgaagagatccaacggaaattttccggagtagacgtgttggttaacaatgcaggaatagttaagcatactttgctactatgcgatgatgatttccaacaattaagagatcttatggatactaatgtgatgggactagctctatgtagtcgtaaagcattcaaatcgatgaaagaacgatgcgttgccggacatataatacatattaatagcgtcgctggacatacggtttccaaatttcctcatatgaatatgtatgcggcgagcaaacatgcagtaacagccatcactgaaacgatgcgaaatgaaatacgagagcttggctccaaagtcaaagtgaccagtatcagtcccggagtggtaaaaactgagatagtgagagggctgcatagttctgaagagttccctatgttggaaagcgaagacattgcccaagctgttttatatgtcctgggaactccccctcacgtgcaggttcacgagcttaccataaaaccagtgggagaaaatttttaaattttaatgattcgatggatggcacatactagtacacttcgttgttatttcctcaatacatcttatagaaggaggttaaagctttccataaagtgtcattaaatacttcacataattttgagaaagaatatctgaaaaaatcctcacctcatctagttttttcttctttctttgaatctagatatcatgatatgcatgcatactcttaaacttcaataaatgtaaattaataaccatgccaaatttcagct

SEQ ID NO: 1062 - DNA, 3865 bp, Aedes aegypti
atggcggtcagctttacgatcaacggtcaactgtaccacgtaaccccaaacgatgtcccgatcgagaccagcctaaactcatttattcgaaatcatttgcacctgaccggaaccaagtttatgtgtctcgaagggagctgtggtgcctgtacggttcatgtggccgggattcatcccgtcaatagggaaccaacgtcatttgctgttaattcgtgtctgatgccggtttactcatgccatggaatggatattacgacaatcgagggaattgaatctaaatctaagtttaactccattcctagacgtttggcacgatttagtggaactcaatgcggagtttgctcacctggaatggtaatgaacatgtacggtttgttggattctacgaagggacaaataacgatggatgaaatagaaaaatccttcgctggcaacatatgtcgttgtaccgggtatcgccctataatggatgctatgaagtcatttgcagtcgatgcgtgtagtgcgttgcttgaaaagtgcaaagatattgaggatttgggagataagtgcaattcggataaaaagtgcggagtgatatgtccgaaaactacagacaaaaaatctattcatttattttttgaaaatgataaagaatggcacaagatttatagtgtacttgaggtgtttgaaattctcacaaatattggttgtaagccttactgcttcgtagcaggttccactgcgcgagaagtgtattctgataaagagggttcgaaagtattcattgatataaaatcaattaaggagctgcgctcttactggatgggaagtgaattgattattggaggaaatgtatcattaactgaactcattaatatcctcaatgaagcagctggaagtgaaaagaaattcaaatactgcgaacaggtaggcaatcatacggccatgatcggtcacaagttaatgaggaacgttggaacagtggctggaaatttgagtatgaaaaacacccaacgaggatttacttcggatttgcatgttattttggaaacagtacgtgctttgataacaataactgattgccacggtcgaattgattctgtttgtcccgcacagttttctcggatgaacatggataaaaaactaatcctaaatgtgtcattaccaccgatgcatgcggataattatgccttccgttcatatcgcatagagtcacgagcacaaaatgggcgcaccttcgttgtaggagcctttttcatacgatggtgtgctagacaacgaaccatcgagtctgctgctgtttgttttggtggcatcagcccaacctttactcacgcgattgagactgagaaaaccctctgtggtaaaaatccctttagcaataatgttcttcagcaagttttacatgcacttgagttggatctgaaaccttttagggatccatctcagattgacccggagtaccgaaaacaggcagcaattggaattttctacaaatttatgcttgacatagctcctaagaaactcgtagatccaaggttcttatcgggatcaaccaacatggagagaccgctttcaaatggtacacaatcttataaaactttccctcagaattggccggtgaccaaaagtatcacgaagattgatgcggttttacaaacttctggtagagcgtcttacatcaacgatacacctacaatggcacacgagctatttgcggctttcgtcgttgccacaaagcccaggaccgttattaaggaggtcgatgtgactgaagcgacaaaactacctggagttgttcagttcttatctgctggaaatatcccgggtaataataactttatgccatatgcaggcaattcaaaacactttttttcgtatggaaaagaagaggaggagattttctgtactggaaaagtgctttatcatggtcagccggtaggtttaatattagccgaatctttcgagttggcaaatcgagcatcgaaattagttcgcatagagtactccgagcctgatggacctgtacttccaactttcaaacatgtacttcgaaacagttcagcaaatcgtatccaaccagcaggcgtaccccaatcgggccgcaactacgaatctatcagcggtggctattacagagtctctggtcaggtttcattcgaaggacaataccactatacgcttgaaactcaatcttgcatttgcgtaccgaaagaagacgggatggatgtatattgtgcaacgcaagatgcagatcatacgctcgctacaattgctggagtcttgaaattgccacaaatcaagatcaacgtaatctgtcgacgagtgggaggttcttttggctcaaaaattacacgcagctcccatgttgctggtgcctgtgccctggccgcttatatgactcaacgacccgtccggttcaggctatctttagagtctaacatgacatgctttggaaagcgtaaaggtagtgtaagcagctacgaagtatcagtacgaggtgatggtaaaatagcaaggcttaccaacactctaatctacgactgtggtgctcatataagtgaaccaagtgtaccattatatatcaaatgtttttccaatggctatgatgattcagcatggaaaataattcccaacaaagcacgcacagatgcccctacaaacatttggggtcactcttctggtacagccgaagcagtggctacaatcgagacaatcatggaacacattgcattcgaaagaggtttggacgtacttgatgtccgaatgataaactttgctaaagatagcaaattgcgtttactgttgccacagttcagaaaagatatagagtttgataagcgcaaaaaagaaattgagctcttcaacgaatccaaccgttggaaaaagcgaggattatccatagtacctgtagcatttccagtcgaatacataggcggaacgaaggcttggatttctgttcaccatcttgatggatcagtttctattactcatggtggcatggatataggtcaaggattggacactaaagttgctcaaattgctgcccatactttaggtgtaccgctaggaaagatatcgataaaaccttgcaatacattagtttcagcgaacagctttatggcaactggcaattcttccagtgatcaagtggggttagcagttatgaaggcctgtgagattttgatcaacagaatgagaccaataagagatgcaaaccctaccgcttcatgggaagttttggtgagcacctgcttcatctctaatgtgaatctaaccgcttcctattggtctacagagagcgacgttgaagcccataaaatatgggctttagggtgtagtgaagttgaactggatgtgctgacgggaaatgtcagagtagttcgagcagatatcgtcgaagatgtcggagaaagtcaaaatccgagcatggatatcggacaaattgaaggcgcattcgtcatgggacttggctactatctcaatgagtctttacagtatgatccacaaacgggagcactgttgaccaataatacgttcacttacaaacctccgggaccaaaggacattcctacagattttcgggtaagactgtaccaaaacagtaaacataatccagcggaagctttgcgttcaaaacctacaggagagccggctttttcggttgctgtttcggttttatttgctttacggcaggctctcacgtcggcacgtaaagatgctaacctacgaactgagtggatacagcttggtcaaccatccaatgcagagaatattttacatttggcaggaaattcaaccgaccagtatacttactataaatgttcagtagataataagcccaatacaattctatgattaattaatataccttggagcaaac

SEQ ID NO: 1063 - DNA, 534 bp, Aedes aegypti
aatcgcaaaacgtcaaagcaacaaaattacagcagcaggattatcgttttaggtccagcgagcgattcgattctgtaaaatacgaattaaataacagaaaatctacgactaaacaggttaaccacctccagaaccatggccgcacaagtgaccattgatcagcttgataaggatcagatcaagtcgttctccgatttcctgctgtcgtacaataaactgtcggaactgtgctttatcgattgcgtgaatgaatttaccggccgaagcgtttccgacaaggaggacaaatgctcgctgaactgtatggaaaagttcctgaagatgaaccagcgggtgtcgcaacgattccaggagttccaaatgttggccaacgagaatgctttggccgcagctcagaagctgggcggtggtaaatgagaatactagctttttaacagtgaattagttgtgtacaaatggaacagttttgttttaagcattaaatttattttatttcagccaatggtaataaacatgatttataatggttaataa

SEQ ID NO: 1064 - DNA, 633 bp, Aedes aegypti
gaataactcgcaaactttttccgaaattatagtgaaaattctcgtcaagtgatggattttgaactaagaaatctgaaagacttcctcaccctctacaaccaagtgacggaactgtgcttcaagtcctgcgtggacaacctgttcgggcgggaactgagcggagacgagatccgatgcaccgacaactgcgtcggcaagttctccagcgtcaaccaacggctgatgcaggtctacgtgggcgttcagagcgacatcaaccagcggagaatggtggaattcgatgcccagcaagcgaaattgttggaagcgcagaaacagtcggaaacggcgccaattgaaccagtcaagacggattccggtgcgacgacgatatcgactggtggaaccgagtctgccaacaccacggtggacagtgggaaagttgagacggtagcaaattaagggggtgtggttctgaattaaaatttaagcgttaggttgattgtatagtggttcgattagtagcaatgaataaagtttgtttcgtcgtactgataggaattccgggtgccggaaagactaccttttgcgaaagattccagcaaataatgttagaaaaatattctatggttaaagtggttcacgtttgtttcg

SEQ ID NO: 1065 - DNA, 1472 bp, Aedes aegypti
atgtcgactgtcttcaacattatattcaaatgtcattctttcagtgagcgaacgattttcacctggcatcgtttcaatcgaacagaaatttggcgtgaagctatgtctggtgctatcaagaaggctaccggtttgaccgggctcaatgtggccaagaacccacaccacactctgaccgccctgtacaacaaaatcctccgggccgtggcgaagatgccccaggatgcggcctatcggcgttacaccgagcaaattgtttcggagcgtgccaagatcgtagcttcgacaccaacggttcgtgaagtggaggacaagatcaactgcggacaggtggaggaactgatcatccaagcggaaaacgaactgacactggcccgtaagatgctcggttggaagccatgggaacctctggtgaagcaggccccggcaacccaatggtcctggccaccggcgaaaattcacgaactcaagtaaggtcggagaaagaattacattttattgattgtttagaacggttccctgtaaatatagtcctgcgtaattgaacaggcaatcgaaagcgagttcacgttccctcagagaaatccttgactaggtgaacactattttcagtttgagacgatagtcgtgacctataagacgataaaaaaatcaacgttttattgctgaacaacttctatagagttagtgctttagctgttttttttttttcaagtggctttatttgctcactttatctacatctacatcttgccccgtcttcctctacttagataaatagctcctggcattcatgtcaaaaaatattttgaaacgattcatagcaaaacggccgtaataagccactagtgggactacattttttttaccacttgactgaaaaaaaaactttctgtttgttgatgtttctacatcagtatctacaagtcactaataaaataattcaaaaaaatttagatagaacagttttcccatatatttgattgaatttctcaattcaaacttcaagctcgcttagttgatggatttcgttgaaattgttactgtagcttctctgggtccaaataaaaaaaaaatgaggggcgtagatcggcttctcaatatgtagtccactgctctatgaaacaaatcgtaatgtaacgcgaaaagttctatcgctttgctctcatttgctttgctcttttaatcattcgcagataatgattgcttgcatatactcttaaaaccatatcaaccactagtagttgtgtgtaagtgtaagcattccactgatcttagctttaccgtctccctgaaatccaccaaaatgttgattgtagctagctgatccctgcacttcggtggttccgcttttacttcgccataatcgggcaatcgcctcagccgtaacgtccgttccttcgtcctgttgatgggtagctccaaagttcatcgaaaactgacgtctcactcggatggacactgctggttcc

SEQ ID NO: 1066 - DNA, 696 bp, Aedes aegypti
atgaaaatctatgccgtatcggatggacctccctcgttggcggtccgtatggccctcaaagcgctagacattgctcacgaacatgtccccgtcgactacggcaagggagagcacatgacggaggactatgccaagatgaatccacaaaaggaaatcccggtcttagatgacgatgggttcttcttgagtgaaagcaatgccattctacagtatctatgcgacaagtacgctccggacagtcccctgtatcctaaggatcccaaggagcgtgccctggtcaatcatcgcctttgcttcaatttgtcgtttctgtacccgcagatatcggcttatgtgatggcaccgattttcttcgattacgagcggactccgatggggctgaagaagctgcacattgctttggccgcttttgagacctacatgagccgcttgggaagtaagtttgccgctggagatcatctcacgattgcggatttcccattggtcacatctgtgatgtgcttggaaggaatcaatttcaacatcgatcaatacccgctggtgaaggcatggtatgccaactttaagcaacaatatcccgagctatgggccatttccgctgtgggaatggcggaaattactgaattcgagaagaatcctccagatctatcaggcatggagcacccaattcatcccatcaaaaaagttaagaaatga

SEQ ID NO: 1067 - DNA, 1509 bp, Aedes aegypti
atgtggctgatcgtgatttcgattctggtaactatcgtttctttggtttaccattacttaacatggaatttcaactactggaaatatcgtggtgttcctggaccgctgcctaaaccttttctgggcacattttcgagtacgttcacgcaaaaagagcatcccatagaagagaataatcgtatttatagtttgttcagagaatacagaaaagatgtgccattcattggaggattttcattccgcagtccacaactcttcgccttatcaccaacgctagtcaaagatatattggtcaagtatcataaacacttcagagctaacgaagtcggaggaacgttcgactcaaaagcggatcccctgttggcaagaaaccccttctttcttgatggcgaagaatggcgctcaaaacgtgcgcagatcacgccggcttttacaaattctaggttgaaagcacttctccccatcatggacaatatatgcaacaatatggtaagctacatagaccgacacattccaaatgggccaatcgagtctaaagaattgtcagccaaatatacaaccgatgtcgtatcaagctgcatctttggtgccgagggcggatctttgacttcggacagatcggagattcgagaaatgggaaacgctcttttccagcaaaccttcatgtttatagtgctggccgtcatttcgtccattgccccgattttgaaacggttcgtaaaactgagtttgattccaaaatccatcgagaattatttcgttggcttgatgacagaagcagtgcgaaaacggaaggcaagtggcactaaacaagttgattatctggatcacctgatcaacctacaggagcagaaggaaatttcgatactggatatggctgctcatggagtgacatttttcatcgacggattcgaaactaccagtgaagttttgggattttctctattggagctatctattgataaagaaattcaaaatagattacgtcaagagatacattccgcagaagatggtcaattaacatttgaaactattatggagttaccatatctggatcaaatcgtaaacgaaactcttcgtaagtggcctccagcgtacgccctatcgaaaagatgcacagaagagatcactttccgcttgaaagacaaccatgaagtccttattgaaaagggaatcacagcaatacttccgatctgggctatccacctagataaagaattttatccggacccaaatcggttcaatcccgatcgattttcagaagaagacggaggtcatagcgtaaggtactatcaagagaaaggagtatttttaccatttggagatggaccgagggcttgcatcgggcggcgaattggcttgcttcaagttaagcgagcactggttgaaatagttaagaactatgactttacagtgaactcaaaaacggtgcttccgatcaaaattgatccaaaaaatatagcagtaacccctctgggtgggatatggatcgattacagaaagctgtga

SEQ ID NO: 1068 - DNA, 572 bp, Aedes aegypti
ctgtcgtgtgcgctgtcaaaatattctcgtgtaaaatggctcttgcgagtgctttaaaatccggaattttgcgaataaacacggctctactcaacaatgtgagaccattcagtatcacatctgtgaagcaacttaaagaaataaaggaaactacccaaaaggatgcgctggtcatcagtgcggaatacgttgcctctccgcgatcaaatcagatgctgcagcaggtgacggaggccaaatgtggaagtggacaacaattctgtccccagtgcagcctggggttggatatcaagcatacggatgtgctgatcttgagccagtatctgcgcagcgacggatgcatgcttccacgccggattactggattatgtaagcgtcagcagcgacgaatcggctcactggttattatggcccagaaagcgggactgatgccgaacattggtccttcgtggagcaagagagatcccaagaaacgataccagtggaagaagtataacaaatatttcgacgagagcaccattaaatgttagaatgttgattgttggaataatatagcgatttgataagcagga

SEQ ID NO: 1069 - DNA, 1638 bp, Aedes aegypti
tcataacatccgacctggtgcaggattttttaggatattattatgtgatacaagtgtatttccataacgataggaatgtcatcgaaaacgggcctcttgacagcggttcacctggccaatatcaccagcactttggacgccactcgcaagtatgcactgggaactctctacctacagttacatccccggttccaggatgtggcaaaaccaactgctttcagcaaatttattgccactgtgtatcaaagttcaccaaaggtgctcggtccaggggtggacctacgaatactgattagttctctcaaatcgaaggagattgttccggtgaatcgccgaattgattacctcttttccgattactgccttgatccgcacttggatggattggatgtggcgaggttctaccctggcgccagtgtgatcgaacttggaacgcagcccttctcgatcgacgccaatggattgaccgattctagtgaaacttataaaaatgtcgttcttggtgggacgttcgatcgaatccatgccgggcacaaggttctactctcgcaagcggcccttctggcagaggaacggttggtcgttggcgtgaccgacgagaatatgatcaagagcaaaaagctgtgggagctgattcagccaaccgaacggagaatcgaagatgttcgggcgtttctcgaggacgtggatcgaaccttgcggtacgaagtcgttcccattagcgacccgttcggaccgacggctacggatccgaatatggacctcatcgtcgtcagcacggaaacggctcgtggtggcgccaaggtgaacgaacttcgcgccaaaaatggactcaatcagctgcgggtacgcacgatcgatctactggacgatgaacttacggaggaagataaggaagacaagatcagttccagcaacatgcggatggatctgttgggaactcgtctcaaaccgcgtgacttgaaaccacacctcagtccgaaaccgtacattatcggacttgttggaggtgttgccgctgggaagagcaagatggcggagcgttttgcaaaacttggcgctggagtgatcgattgcgacaagatcgcccacgagctgtacgaaccgggcgaggattgctaccaaacggtgatcaacaatttcggcgtgggcattttgaacgaggacaaaacgatccaccggaaggctttgggcgcgattgttttctccgatccggacaagttggatctactgaacacgattctgtgggacgccattttggagcggaccaagctgcgcatcaaggaaatatacgagaagcagaacaaacagattattatcatggaagcggccgttttgctgcgagccgggtggcaaaacgcatgccacgagatttggtcctgcattattccccgcgaagaagcaattcagcggctgatggataggaacgggttaacggaagaggaagcggacaaaaggatcaaggcacaagttagcaataccgaactggtgcagaattcggatatcgtgttttgcacggcttggagttatgaatattcgcagaaacaagccgaaaaagtttggacagatttggtagaagagctgaaattgaagctgtgaattttattgttgacggaataaatgttataaggttttggg

SEQ ID NO: 1070 - DNA, 1544 bp, Aedes aegypti
ccttttttagtcacttaaccttttcaatctaactgactttgctcctcacccacgggaggatgatttttgttacgaacaagcggcaaaagcagaaccaagagaactgtcaaaaactcgtgtcttcgcaccaaagcgttattcaatcgcaaacaaaatctgatttttcggtttttctccgcgagtgtaaaataatcgggacatttttaatcgtaaatcccctccgaaatgcgtttctcggccgtcctgttccgacagcacatcgggttccacttcaagaagcactggatcatccagggtaagcgagttccctcggaaaccggagcgcaggctgaactggccgctcgtggcattccggtggtcttggatccaaccgaactgatccgggaacgacgggaagtggaccataatcttaaagtggtgggccagttgccgccggaggtgcaactggacgagaatcatccgctgtacaagcaagaacagtgttatctttacggggatcggaatgtcctgctggagggaacccggcaggcgcaggttctgctcaacacggccatctacgatgagttgccgctgaaggtggaggagcggctggacaggaccaagattccgacgcagctcgaccggtccatgcagcagtctgtgctggcggcgctcgttttcgatacggaacaggtcaaggttggcattgtgaaggatccggaacggccagcgtacaaatttccccgagtttacgggatttccaacgaaaggaggaatcgcctgatcctctccaaactggtgacccattgcgagcgcttcgtcggccaggaagtggcctgcaatcgcaagatcatcgccaacacccacttcatcgtgcccatcaccaaggaactcgaccgcatccagttctcgcttaaagtcgacagcttcatcacctcatcggctcccctcaaaccgttggacaactccgtctaccgaccacaggaccaaaccctgccgggcattttccccgtcaagcaaacggtcaccattccgaccacgcatttctacgagtggcaaaccgagtaccccatcagccgccagtacaggttctcccatccgcacaccgttctgctgcactgcgctccggaatccgtggagaacatgttcgagacgccggtcacggacgaccagaaggaggcccgggccatgatcaaggcgtttacggtggcggcagcccgcgcccggcaactttacgggaacgacgtccaagccttggcggcccccatccaggtgcaggtggtgcaaaccgacagccagtggttccactttggcatcttccagctgaacacgttggacctgaacgcgtccggggagagtgccggcagtcgcaatctgtggttccgcaagccgcggatggacctctactcgcagtgtggctatctggtgggaaagccgagcctggtcgactacaaccgggacgtgttgcggcatatggccgtgttctatggtagtagttaggacagatttgtgagatgaaacaatgaagatgaattagtgaattgtgattcgtattctgcttgaag

SEQ ID NO: 1071 - DNA, 670 bp, Aedes aegypti
cagtttcgattattcagcgctcgcaacaggtgtgtggtcttcttccggatagactcaactctacatcaaacttccatcgttgtgactgccatttcgtgcacgatttaacgcaaattcgttttagtgcacgcaacaagtttagatccagaatctccggaaatggctgcattgaagcaatactcgtacgccgaagtggcaaagcacaacacccccgcagacctgtggatggtcatcgacgacaaagtctacgacgtcaccaaattccaaaacgagcatcccggaggggaggaagttctgattgagatggctggaaaggatgccaccaacgagttcaacgatgttggccacagtaccgatgcaaaagcacaaatgaagcaattcgtcgtgggagagatcattgaagccgagcggaaaaagaatgtttcgaaacaagattccgattctccgtcctcgtcatccggatcctggtttggagccttgaaggctaagctttttggataggatttaacgcattagttgctgttattaatacttgtatcgaatacaatagctaaggcattctgcttaactatcttaaagtaactttattcaaactacctgtggtgctatgtttaaaacattctatccgagataataaaagtttactattatacactttactatcaagcaa

SEQ ID NO: 1072 - DNA, 1128 bp, Aedes aegypti
cgtcagatatcaaaacgtcaaaagtttagcagcaacattttcagcattttcaacacgagtgattattttctttgatatttcgcggaaaacctgcataatataacaactttaaaggatttaacatcgtctaagaactattctcaatggcatccgccacacctcagggagccagtctgctctacggactccgcaagtcgaaaaagttcaccaagggctggggagcgcagctgcccgcggcctacaagaaattctgggacgaatggaagctccagcagccagctgctgttcactatgttccgaaggatggaatgtttcaacgggaagacgtgacaggattggtaacgccaatccaaaacgtaccactgccactgatcgatccgccagagtcgcatcaaggaatctggggcggagaagccattgtgaagggcttccaaaaacgcaacccatacaaacgccgagttcctcacttttgggttcctgttcttagacgttctgttgtacatagccaagttttaaacgagtatatggcggtaacggttaccgatcgtacgctggatcaaatccacgacaaccatggtttcgatcattacttgctgaaaactccggcctgcgacctgcgttcgatgctagctattaaactgaagaagaaggtacttgtggacctgttggcgggatgtcccaaactagcttccgagccggagaaacaacaagccgtcctgaaagagtacgcttgctatctgtcccagtacaccccagaggaaatcgattggtatggtctgacgtacgtggaagctgttctgaaaattaagaacgaagttgaatccaaggaggacaaacgaccgcacaaattgatttttcgtcaaaagctgatcgagcaactgaaggaggccggtattagtgaagcgcagggtacaaccgaagaattgaaagcaatggaagactccagctcgtcttcctggctatcgaagcttagcttcaaacctaagaactggtagggagacagtaagtagccaaaacaaattctggtctaaattcttttgtttgatatagtcataaactactctccgggtcatggagagaagacaaatagagacttgctcgttgaaacctaaaatgagagtacaaacc

SEQ ID NO: 1073 - DNA, 663 bp, Aedes aegypti
atggccaccaacagtccccgaatcaagctgtacaccaatcccatcagtcctccgggacgatcggtagaactgacggccaaagcaattgaccttgacattgaagtcatcgcgattgatctgctgggaaatgataccctaaaaccggactatctcctcaagaacccacagcacacgattccaatgatcgacgatggcggtaagttcatttgggacagccaggcgatcaacgtgtacctcacaaccgtctactcacgcaacgaagatctatatccgaacgatcctttcgtgcgcgccaaggtgaacgccggtctgcatttcaactccggagtgctcttcagccgtctgaaactgttgatctccccggtgattcgtggattcaagcaggacctggacccggaaaaggtggaatactttaacattgggctgcagctgctcgaggatacgctgcacgctgattactacattggcaatcggatgaccttggccgatttgagttgcgtttcgtcggtgtccagcttcgatgcggttctgccgcttgataattctagatttccaaaaaccgtcgactggttgagacggatggaacaattgccgtactatggggaagcgaatggagaaggtgcaaagaaattggcgaaggttgtacagagctttctgaaataa

SEQ ID NO: 1074 - DNA, 1896 bp, Aedes aegypti
agtgaaaagcaggcggttcggtcgtttcgcaatcatggctgcagtaatcagaaatttaattcggaataaaacacttaataagctgacaaacattgagtcaaccccgattcgatgttacgccagtgccaatcgtgtaaaacctttcaagaaggtcggcgtttccgataaggctaggaacgatgcgagggcagctgaaatgcgatcatctggggcggccgaagacgccaccctaatggtgggtcagcagatcaaatctgtgggtcaatctctggctagtcgaggttacctgcggcctagtaagccctactccccaccggaagacgttaagcagacagttttggaactggccaaatcgaacaatataggcaaccccaagcaaaagtttgccagcaatcagcaaaagttcgactttttggccgcttgtttcagtacattcaagcacggcgttcccaattcgaggctgcatgagctcaattccgttgaggatgcagtggagttttacagcacgccagttgataccactcttccactggatgccatgaaaacagtggaactgccagagaatctgtacatccaacacgagtacattcgtttccacccagagacggacaccatgttcggaggtaagtcagccttccccaagagttccaccatcgttactggtttgaagtacaagaacaaatacaagggtcatgtggcgaaaaaatcgtggccttgaacaacgtaaaaatgcaagtaagtcatgtggtagagaataataattgttatatttaaaacgaaaaaaaaattcaactactatcttcgaaattatccataagccaactcgatcgctttcttcttcgcttccatccactgctccgggtgtttgctcttcttgtgtgagtacagatttccgttggaattggtagtcattccgcacacatcgcacgagtacaagatttgacccgtatgggatgctcggtgttcctttaaatagattttccttttgaactttttgccacaaaattcgcactcaaacttttcctcaacgtgtactctccgtttgtggctggccattgccctcacgttcggataagtatgtttacagatattacacgtcaccggtttgttcttctcagagtgcatgatatttacgtgggtcttcagattctgccggccgcttacccatttgctgcagatgtggcactgaacccgttcgatcgtaaccactccctggtgtctcaagatgtgtcgctccagtcccaacttggtacgaaattcctggccgcatgtttcacaaaccagacttgcacgctcgccatgcattatttccatgtggcatcgcaaagtgaacgcactagccagcaacttgtgacagattgtgcactccgcttggacatgagtctgcaaatgggccctcagaagaaatgcctttgggaaacttcgatggcatttttcacatttgaacggcttctcttccgagctgctgtgcgatttaacgttgtgtaaatctaaataatactttgttttgtagcttttattacacagctcgcaatgaaactgatttggattcacatgcgcatcaatgtgttcaattatcctgcacttcttatacatcacacgattgcaacatttgatgctagcacgtacattgtgcttcttctgggtatgttgttgtaaccggtacaactcgtcaaatgtctcggagcacacctcacaagttagcttgaagaattccctaatctttatgttttcttcctttgtcctttggatcctcgcctcatctggtttctttttctcgacatctaacgcagatcgcttagtgtacttccttttagttctttttggtgctggttcttcactgctttcactcgaatcagaatctacgttgtaatcatcttcttgtttgatctcttc

SEQ ID NO: 1075 - DNA, 1937 bp, Aedes aegypti
cggcagtccaaaactaagagccacattattatttcttctcctcccgtgtaaagatggtgattagaaaactgtacgttccgcctgcagtgcacaaacatgttgctcaacctgttgaagtggtgaaaccttctgttgagcaagaaactgctgcggcttttagtgtaccccaatccgctcaagatccagaacccatctctttgagtcatgtgaatggagaagcagatgatgtaatagtgcaaatcgctcctggtaaaattcgtggtgtaaaacaagtgcttccaaatggaaaaaactacttccgttttagtggcataccttacgccgaaccaccagtcggtgacttaaggttcaaaccaccagtgccggtgcaaaaatttgatcgcgatgtgttggattgtcagaaggaaggtagcaactgctacagttacatgtattatccaccagagaacgaagagtttgcatcggaagattgcttgtttctgaatgtatacacaccaaagctgctgaaagatcaggatgttgcgacattgccggttatgctatggattcatggtggaggctttaatcttggcagtggagatgctgctgtttatggtcctgaatttttgctgcaggaagaagttgttgtcgtgacgtgcaattatagattgggaacatttggatttttatacctgccgtctgttggaatctatggtaatatgggattgaaggatcaacgactggtgttgaagtgggttaacgagaatatcagtcgtttcggaggtgacccaagcaatgtaacactgtttggagaaagtgccggaggagcctcggtgcatttgaattatctagcggacagctcgagacaatacttccacaaggcaatctgtatgtctggcgtttcttataatccttgggttttgcaaagcaatcctgaagcaaaggctcgtaaactggctgagcttatgggtgccaagtctacgagtgataatgatacactaatggaagctaacgctaaggatcttcttcttcattcgccggatgttctcagcgagaacgaaaaacgtacaaataagtatttcgcattcacgccagtagttgaatctgagtgttcggaagaatcatttttgatggaaaatttcatcagttcgatgatgaagcccaacatgactaaaattccgatgatgaccggcgttactagcaatgaaggtcttcttgtagctgcccaattatcgagagatattgagctctacggagcagattcaaaaatgatagtgccacaagagttgccactggatgaaaatcgtctaaaagaagccgctgatgaagttagacgattcttctttggtgataatggcatcactgtggatcgtttgtcaacattggtcgatatcatgtccgataacatgttcgtaatggcagcctatgtcgcaagtgaacttcacgcacgttatcaaaatgaggcaccactatacttctatctggactcatttgagggaaaactgaacaaataccgcactttgttctctgttccggagcatcttgaaggagtatgccatgctgatgaattgctctatctgttcagctcgacgtggatgggtaccgacgtcgagccaggctcccgtgaggataaattccgatcgacgatgtgcaaactgtggacaaacttcgcgaaatatggaaatcccactccgccgaccaacggaggaatagattttgtgtgggagccagtcaagccggcctatgattcgcagtttgtactgagcgcagcaaatttgaatgatgagttgacgatgatagaaaatccgtttttggaaagagttcagttttggcgcgaaatattcgcacgttattacggcaattatttgatgaatgaaagcgtgggtggtaaaacatataatggtcaataaaaatggtttcaaatgatatcaatgaataaatacatagatttattatat

SEQ ID NO: 1076 - DNA, 7490 bp, Aedes aegypti
cattgaagtgaacagcaacgcgaaatttgtgccgtgtactgccaagaagatcactgtgcaatcacaaccgtagaatctggacccagtgccgcctcaaaacaaaaacagtggtgaccgcgagtgaatacacgtaaattttgtaaggtgaatggtgtgaattgcggtaaaatttcgatttttccgctagtgattttcgaccgtctacgatcgccttggtgcaggaaaaatttctcttcgactacgtagcccagacaagaggtcatccaaaatggcgtccatttgcaagtggtgaaaatttttcacggtagtaaaagttgaatttcggttgtttagcacaactttttgccgtggatttcaacgtttttcgatgaattggttaaaacgaaacaatttgaacgtgaatccccgtggatcgtaacaactttactttggaattataaggaaaaaccctttggaattcgtcatgagccagtcaaaagaggacaaaagcgactcggaaaatgagtcgagtagtgacagcaaaagcgaatccggctcgtcggattcggagagcgagagcggatccggttcgtccagttccggttccagcgataacgaagaccagcagcagaatgagcaggatagcagtgtgaacacctcggcgcaaaacgacaacgcgcaggatggttccaagccggaacagaacggaaccgcttccggtgaggatgaggaagacgacaataatgccagtgcaaatcgtcagaacgctagcaagtctggtgaagaggaggaggaagaggaagatgaagaagaggaggaggaggtgaatagtagtggtgctgccgctgccgagcagattaacaatagtggcgaaatgaacaacagcaaatcgcacagcagtgcccaatcgggtggctccggatcggaagaaagtggcgacgaggataatcagagcgaagcccagaacggatcggattcggacgacagcggcaaaccgagcaacgccagtcaaacgcaggaagacgacgacgacgacggttccggaagtcacaattcggacgacgaggaggagcaggaggaggaacattcatcaaaaagtagttacgatgatgaggactatgccgctaaccgtcgtcggaacaacgcacgcaagaaggctgccgcagcgcaagccaaacgcaaggcggcctcttcatcacagcccacgaagaagaaaaagagcagtaatcgttggaagtcggaaacatcggaggacagcgatgccagtgaaccggacagttccgaagatgaggacgacagccggagttacggagcccgcagggcagcagcgaaaaagcgtccagctcctgcaccgaaacccaaagcagcggcaaagaaaaagaaacgcgctgcagcttactcttccgatgaaggtagtgacagtggaggagaagcgtcgcggcagggtagaagtaggaggaaaacagctgttagctacaaagaggcgagtggtgatgaggtaaccgatagcgaagacttgctggaggttgaccaggaagctgaggaagctgctgcagcagctgctgccgaagaggagaagactgaaacgatcgaaagaataatcggtcaacggatgggcaagaagggtgccaccggagcggcaacaacaacttatgccgtggacgaaggtggtgatcccaatgaaggtgtcgatgaaaatgatacggataacacagaacaacagtatttgatcaaatgggctggatggtcttaccttcactgcacgtgggaatcggatgaaacactgaaagagcagaaagtgaaaggaatgaaaaagctggaaaattacatcaagagggaaaaggacatcgaatattggcgtaagtaccaagccggtcccgaggatattgactactacgagtgtcaacaagaacttcagcaagatctgctgaaaagctactacaacgtcgaacgggtgatagctcaggtggaaaagcctgagggtggtggaattgattatctgtgtaaatgggaatcacttccttacgcggattccacatgggaggatgcaagcttaatagtgaaaaagtgggagaagaaagtagaggaattccaagatagggacaacagcaagaggactccgtcaaagcattgtaaagtgataaggagtcgaccgaaattccatcatttgaaatctcaacccgattatctgggcgaggatcgaggcttgaagctccgagactatcagatggacggtttaaactggctggtactcacatggtgcaaagaaaactccgtcatattggctgacgagatgggcttgggtaaaactattcaaaccatctgctttctgtattatcttttcaaagcgcaacaactgtatggtccgttcttgtgtgttgttcccctgagtacgatgactgcgtggcaacgcgagttcgccatatgggcaccagagatgaatgtcgtaacgtaccttggtgatgtagcttcgcgtgaaatcatacgtcagtatgaatggtgcttccccaatcagaagttaaaattcaatgctatcctgacaacgtacgagattctgctcaaagacaaaaccttcctgggaagcgttagttgggcagtccttttggtcgatgaagcacatcgtctgaaaaacgacgattccctattgtacaaagctctagaagagttcgacaccaactaccggttacttattaccggaacgccgctccagaactccctcaaagaactgtgggctttgctccacttcatcatgccaaataggttcgacacgtgggaatcgtttgaaaggctctacggaaacaccagcaatgataaatcctacacaaaactgcacaaagagcttgagccgtacatccttcgacgagtgaaaaaagacgtcgaaaaaagtcttccggcgaaagtggagcaaatcctccgggttgaaatgacctctcttcaaagacagtactaccgatggatcctcacgaagaatttcgacgccctgcggaaaggcaccaaaggttcgatcaatacattcctaaacattatgatcgaactgaagaagtgttgcaaccatgctttgttgaccaagccagaggaattcgaaaatcagacgaatcaggacgaagtggtagttcagttgctgaagggatccggaaagttggtcttgttggacaagttgttatgtcgacttaaggaaactggccacagggtattgatattctcccaaatggtgcggatgttggacattctggcggagtacttgcaaaaaaggcatttctcgttccaacgactggacggcagtattaagggtgagctacgaaagcaagcgttggatcacttcaatgcggaagggtcgacggatttctgcttcctgttgtcgactcgtgctggaggattgggtatcaatctggccacggccgacacggtcatcattttcgactcggattggaatcctcagaacgatctacaagcgcaggcccgtgcacatcgaatcgggcagaaaaatcaggtcaacatctatcgtttggtgacggcacgatctgtcgaagaagatatcgttgaaagggcgaagaaaaagatggtgttggaccatttggtcattcaacggatggacacaactggtcggacagttttggacaagaatggaggaagcaattccaccaatccgttcaacaaggacgagttgtcggcgattctgaagttcggagcagaggagttgttcaaggaggacgaggaaggagatgatgaactggtatgtgatattgatgagattttgaaacgggcggaaaccagggatgagaacccagagatgccaggtgatgaattgctgtcggcattcaatgtgaagacgttcgatttcgacgaggaaaaggaaacatctgcaatacgtaacacagtgaaaccaccaacggaagccgaacaggatggtgacactaaagattgggacgagattattcctcagaattatcgggaacgcgtggaagcagaggaacgaaacaaagagttgagcgatctgtatcttccaccgaggagaaaaactctccagcagttgaaccaagaggaaggcggtggtggtggcaagaaaaagcgaaaacggcatgccgatgacgatactgaagatgaatcggatggtagcgatgatggtaaaaccggtaagaaaacgaatgctagaggtagaccttcaaataaggagaagattcctggtttttcggataacgagctgaggcgactcatcaaaagctataaaaagttccctgcaccgctgaagaggttagaagcaatcgcgatcgatgcagagttgcaggagaaacccctttccgagctgaagaaggctgctgaaatgttgtacgaccggtgtgttcagtttatggaacattccaaagagaacgaagagaaagagaagaattccaccgaagaaaaagccaagcgaggtcctagggcggcattttcaattcgcttcggaggcgtatcattcaacgtgaaaactctgctgcagtgtgtcgaagagttagctccactggatgactttcttcctcaagatccggaagagcgggcgaaatggatattgaacattaaaacccgatcagccaattttgacgtcgactggaacaacgaagatgactcgcgattactgcggggtatttaccaatttggcattggatcctgggaggcaatgaaaatggaagagtctctgcaactatcagacaaaattctattgaacgaaaccgataaaaagcctcaagcgaagcatcttcaatctcgagccgaatatttgttgaaaatcatcaggaaacacatcgaactgaagaaaggtgttggtaaaaagcctcgtaaacaacgcaagcctcgtggcgaagctaaagcaatttctgcggaaatggttcattctccgttgtctccgggcactcacaaggaagaagcggaaaataacgaagtgtccgcgacggaagaaaagaaggtctctactccaagtattcccaagatcaagaaattgtccgagtcggattcacatcaccatgagcatgacacgagctcgaatggtcctaaagaagatcacaaagaaccccacaaggaaaagaaagagcgaaagaaaaaggaaccgaaagccaaagagaccaagaaagagaagaaaaagaatacgggaccaatgcatttcacggccaataacgaaccgtgtgcattgaacatcataggagatctggacccgagcgtgttcaacgagtgtaaggagaaaatgcggccggtcaagaaagcacttaagacgcttgataacccggaccaaacgctaccggcggaagaacaggtcagtcagacgagagcttgtctgctcagtattggcaatcagataaaccagtgcctcttggtctacaaggacccggagaaaatcaaagaatggagaagcaatctgtggtactttgtgtcgaaattcaccgaagtcgatgcaaagaaactattcaaactgtacaagcacgcactgaagaagcgaggcgaaggtgacgacagtcacggaagcaacgataaaaagaaagatcaccatggtcatcaccatcatcatcacggacacggtcatggtcatcatcatcacgccaaggatggcgccagttccgcccagaattcgccagtcaaggaagctaaggaaaagtcggataaggcttcgaagagcatttcaggagcaccgcaggctctgcaaacgttgggtaaaatcaaaaagattagcaagaaagacaacagccagaaccagcagagtgcgctggtagtgtcaacgccgttggctgagcaggaaaaagaaaaacccttgcttagcgaccgacgagacaggaaagagaagaagcgccttcatggtggaaccggtgcgcctgatcgaggaggtgatgacggcaaagatgacggatcatatcaatcgaagcgcaagttggaagatggcgagttggacgagaatagcaaggagtacaaacgattgcatggtgatggaaggaacaatcgggatcgagacaaaaaatgggatgattatgaccgggatcgtggctcacggggcggtggcatgtcccgaggacctcccggtacgcctcaaggaatgcgcggtggaatgtttcaagatggaggagggcgtggtggtccctatccggacgatcgatggagtagtcgagataggttcagtgatcataaacgtgaccgatacgacggttacaatcgacaccccccatcaaattatcatcgcgatcaccgagatcgggatcggggagaccgatcctataaggataaacgaagatacccgcctgcccctggaggttacccaagcaaccattacggcatgccaccgagtggttactatccgccgggtgataatccgtaccgatatgccgcagggtatgatcgtggaggaggtcccccgggtggtggcggtggtggctcagggggagacttcatggactatcgaggaagtggtggtagcggcggaggaggacgtggcgactacgaccgaaggccaccgcccccgactagctcgtagcttccaagggtgaaaccacgaaggcagtgaagctgtgcatgtgacggctaggatctaaaatagacttttctcaatatagtgtacagaacaaacgacagattatttaactcagaagatgctatataacctgatatatagtgagagcaatttggtactttttgataccaccataggggcataacttataggaactagttattattttctcagctaacgagataatcttgttttaaactcagttgataatttattaagtcgcaaattttgcaagtaaacaaaaaaagcgcatcccaattgttttttctttcattttccttttgcaatccctattatgggacaaactcatctcatatttcatcggacgtgtaaaattacagttttggatacctcaagttttcgtccctaggttttagaccggcagtggaagcattttgtgttcgtaatcgtacaccagcccagttatgcggggtgtataaacaaaagacgcgaaaatccgattctttgtgttcaagtggacgttctaggatgccgtctctaattattgtgacatgtacagttgtaaaaattaaatacaggagttaggtcgtaagcaatccgcatgctctaaaataaaggaacactcaaccaagtgaaactggcgaagctgtggtgtaaatgtgcgctaaagactggcaaattatgtcgtagctaaggcttaggagaaaatcaatttaccaactattttaatttataccaacacaaaccaattgtcgataaacaaaagtttattttaatttgcaaaaaaaaaaagaaaattaagccgtgaatggctgccgaaagaacaaacattgtttagaaccgtttatttcgaaatagaacgaaacaaaacatattttcaaaaacatttagaagggtggataaaaacatgttactaaaagcagtttccggataaaaaagatactattgaaaaaaaaaaagaaatctatctacaatttgaacacacattaatctacaaaaaataaaacaaacatcaacaatttag

SEQ ID NO: 1077 - DNA, 3142 bp, Aedes aegypti; identical to SEQ ID NO: 545

SEQ ID NO: 1078 - DNA, 2674 bp, Aedes aegypti
atgggctcagaaatccgcgagccggaacatctgcggaaactgttcatcggcggactggactaccgtaccaccgacgaaaccctgaaggcctactttgaaaagtggggcaaagtagtggacgtggtcgtcatgaaggaccccaagaccaagcgtagccgcgggttcggtttcatcacgtactcgaagccgtacatggtggacgaagcacagaacaagcggccgcacaaaatcgatggccgtgtggtggaaccgaagcgggccgttccccgacaggacatcaaccgtccagaggctggtgcctccgtcaagaagctgttcgttggaggactgcgggatgatttcgacgaggagcacctgcgcgactacttcggtgcctttggcaatgttatttcggcttgcattgttaccgataaggagaatggcaagaagcgtggttttggattcgttgagtttgacgactatgatccagtggacaagatcatcctacaaaagagccacaccatccagaacaagatgttggatgtgaagaaagcgttgcccaagcaggaaatggatcggtacaagaccgatgctggccgtggaggtggtgccggtggcgcctggggtagccagcagcgcggtggaggtccgtctcaaggatggggacaaggcggtggccgcggagctggtggctggggacaaagccaacgtggtggccaaaatgaatggggcagtggcggataccagcagcagggtggattcaataacggcggctacggtaatggtggcggttacaatcaaggaggaaactggggcggacaaggaggaaacccgtgggaccaaagctgtggccagcagggaggctggggcaatcagagcggcggttggggccaaggtggcggtagctttggaaatgagtttggcaataactaccaacagggatacagtgccggtccaatgcgcacgggtggataccagaatcaacggtcggcaccatacggtatggagtcgtacgacggtaatcaaggtggcttcggaggaagcggtggcggctacggaaacgctggaggcaaccgtcggtattaaatgattaccgaaatacaagctgaatgagagaggctgggacgcacgctctattgtagaaggttttgcaaagaacagtgagacagattacaggtcagaatcagtcgaatagagagaaaaatgaaggtcaaataggcgtgtgagaaatgagaggaagaagccaaaagaggaaggagtatgaagagagtgcaggaaggagaaggacaaagcattcgtatttgttttattaagctaaccaaggaagaggaaacacaaccagaaacacaagtatatagacaaatcattcaacaggaagacgcagacagcagcaggaggatgagaagtgatttttattgacagaagcagaagaatctttagtgagaaggagaatccttgagggtgtgagaagaattggagcaaagaagaggaagaagaagcaaccagcagccaggataagaaaccagtgtaagatgaaattgcataaccatctcaaaagtacaatcagcgcgcaaagactacaacagcagagcgatatagtaagagcaggttaatttcttgggctgatgattatatcccatcatacatcttcgtcggcgttcctcaccccctctaggctcactttctgagctaccagcccaagtccaagaagaatattaagaaggttcttcatataacaatagatctccgacccctttttatcctacttatattaggatatgcgggcagcaattttccctctcacgcaattttcttcgtgtgcaagaatttattgttttcattttttattgtaatgcagtagtaaaacatgcagaaaaacattaagcgaaatctagttctagagatatttaatttaagaatcagttgtaagagaaatgtatcttttctcgcaatatacacaacacataatattgattattataacagaaaacaaaacatagtaaaggaatgcctaggtaagcaaacaaactcgtaaaaatcgtccatcaaagagaatatacaaacactttaaaacatacacaaactaaagaactaattagattgagactagcgaaaatcgacagatggtagtgcagaacatttaccgagggagggatatccgagggttggctgagagctttatcatctgtacatattttcggaattctctttcgagctttatagtttgaatttccattttctctgaagtgaaatttcaccagaatttttcatttatttgctggtaataattctaaaacctttaccgtgggtttcgatttacttgtctcttttctttcgttagatttttattaatttattattcagtttgactgataatttttaccacgttttgttcctcttcgctttccctgcttcgtagtcagaaaaaaaaaacaaattcaatcaatacatgagatagaagttacaagctgagtaaaacattaccaaatttcctccgtttgagagtctcgttgcgagaaggattcctagaattagagcagtcatgtggagtagctaaaataaaacagtaaaggaaactgaacaaaaaatatctgtactaacaagtagatgagcaacttaagatttaatcaactaaatgttcaaatcaaataattttcaagatagtaaaggaaacaagaaagtatagtaagagaac

SEQ ID NO: 1079 - DNA, 3911 bp, Aedes aegypti
ttgagtaagggaaagttgactgtgttattaatgcgctcaagtcgcatagtaaaataccgatcttcggagagttggctgtagctagaagccgattagtttcaagccgtaatgtatttttcgcaagtcaccattcatctgttcgttgagcgttcaaccgttcgcggactagcgtattttaaatagattataacttgggatctactctagagcgactggtttatgcaacggcaacccatatggaaacgtcagtatttcacatcccagagagaatataatattccattctattctttctggttgactgattcgattcacctggtgcgaattaattagcataaccggattgggtttcaccgccagtgacaattgatcgattacagtgcctctcaaccgcagtaggcgtgcgttttccagttcttccttgttccctggcaatttgattttatcagacctattaagtacacagcgttcaagttcctgcgttcttatacatgatggaggctcttatcgtgactcacatatacccttatcagttcaagaaatatggaatgtgtttgtatagacaactctccatgtgagtctctgcgataagaaacagctgtgtgagaacgtctcaacgacctgttcagcgcttatgcatagggtggttcagagcctgttcagtcttgagtgattctaacaaactgactcagttactgcgaacctccctgaggtttccaccgacggaaggacctatgccgagtgttaggtatcttgtcttagaggtaagcgcttgggtttgcctcccgcgcatcgcctgtgccagtcagtagtagtgagcgagctttcgaacggctcggcagcggccagtgtctgtcgaataattattcaaagcgcgagcgcgaggcgtactacacaaaagatcgcgttcgcgaatcgtacattacccacctgtggaaaaaaaaatgaagaacgggcagaggggacgagttgaagctgtttggtaggaacataaataactagtgagaaatcgtcaacaacaaagcatgccaaactaatatcagaatcatcttagttggccatattaaaagtgtttgtgtttacgatgtgattgatgcaagttgttttcgattgagaagataaacatctaagatcaatcaagcttaattaacatcttgaccaactgcatcagctgcttgctaggcgtaggaagtgcattctgtgacgatgaggactagcagccagcgccgcaaacgaagtacgaacagagagagcagaagtttttaaaagttttaaagtgtcttgttttaaattgatcaacgtggttttaaacggaaaaatttaatacgggagaaaaattgtggcaaagtttctactctccaaattatataagtaggagataagttatgggtagtgtgagctatacagcttgagttacttatcacaaaaagacggtgtgggagagctttgcgtaaactgtgatattaaaccaagaagcaaaagcagaagaaacggaagagtgcgtgccgcaaattaggaattgggtggaatggaagagagtctgatgaaaaatgttcaatcacaaagtgatattcgtaggcggtattcgaaaacgtcgactgggggtgaggtgatacaggagttattctgttcgggtgatttgcaatgtcaaggtgaggacggccaggagaggaaccggcatgccatacaatttgccataagcgccaacagcagcatgatgcagcagaacgaaacgatgctcagccactgtatcactgttgctgcggcgagaacttccgcggaatgtggcactgaatcggaccagatcagtatgaagaatgccgactgtgagatgaaaatgaccgcccagccggatggatttgccgtcatggtggaatcgcccaacaaccgaatccgcgtggctctgagcgtactgatccgcctgctggtacccttgacgcatggtctagctcgaggatggaacggcctacgtggtttccgcctgctgcaactgatgcgaaagatccgagaaagtcgcggcctactgacgacgcttttcgccttcgccgccaacaccgtctcgatgagcctgtcctcggttcaagttgcccaccggattgaccccttgctacgggtgatcaagctgcgaaaggattcttccaagagtgcgatcgagccaggaaaacagtccttgtcaactggtggcaagctcaggcatgcgaagactaacttgcgggagattccggacaagtgtgtggacctagttgtgctggctgaacctcctgctggagttccgatacgtgcggatattgtactgattcatggtcttcacggatcgctggtcaacacttggaagcaaggcttgtggaacagtgaaggcaaactggagcatttcgagcggcctccgaagcctccaatacgacctccaaagcggcagcgtcactcgcgatcgaatcttctagccccaccacacgtattcaagaagccaaagatcgaagaagactctgccgatcggagcgacgaagatgatcagtacgacgagtcccgctcgacgtcgtacagatttgccaaacggaagatcacctacgaatgtggtgaaccaagcaagatccactttgccgatgacatggagtacagctttcccacgtttaggctgaggatggaagaggaaggcggtggtcatacaattgctcaaggatacacggaaaatcgccaccatggtaagcggaaaatgaaggttaagaaggatgaatcgtggtcaccctgttggccaggagattggttgccactggattgtcccggcgtacgagtgattgcgatcaactacactacggatccatatctgtggcgaccggtgtggataacgaagcgcaataggtccaacttggtagatcgatcgcgagaaatggccaatatgcttatcgagaagggagtgggcaaagggcacccgatcgtgtgggttggccactcaaagggagggattttcatcaagcagataatcgtcgatgcatgggagagcggtcgtccagctgcagaacccctatggcggtcttcacgtggtacgttcttctactcagtaccacaccgaggatctccgttggcggattttaatctaccgttgctacgacagtcgatcgagctaactgaaatacagaaaaactgtcccagcatcctggaattgcaccgtcgcttcgtagccctttaccagggcggccacctcaagatcgatgtgttcagcttcgtcgaaacggcattgacactgatgtcggtgttataccttcgtatcgttggaatcgactcggccgatcccggcattggcgatgtttgcggcgtacaccttgaccatcgggaaatttgtaaacctcgcagccgtaactgcatactctacaccgagttggtcaaaatgatcaaaaaggtgagctgaagaagagaaccccaccggagcaacccgccagaacgccaactaggcgatcgaccgctcgcgtgattatatttgttctaaaatattttctatagctacttgttcgaagtggttcaagtacgtttttgttagtgatttgtttcaatttctaaatgtcgaatagttatcatacgtcgaaaatacgttttaatgcggcatagccaagcaaaccagttgaatgaaacgagagcaataattcaatcagatattaacgcagaagaggacagtgtataatcgctacctaagcgcagtaccttcaaattgtttaaaaagcaaaaaaaaagtttctgaaaaaagtaggaataggaaagtggttttgaaaattttcagtgaatgaagtaaaacggaaaatgctccacatttatcgaagcgcgatttgtaactgtagtcattagtctaatcgtagggtattatcgtaatggtcaaccgtgtaagtcatgtgataaatagagattagcatgtttaaacctaa

SEQ ID NO: 1080 - DNA, 4666 bp, Aedes aegypti
cagtagcagcaacgagtcgcctttacattatccattcattgcattattggttgttacatggtgaaaaataacccactgaacagtgtagtgtaggaccaagtgaagtgagtgtatgcataagagtacgcaggctaaaataaatcacagtgctgactcgatacacagtgttctgttgtgaataatcagttgtcgattcgtatgtatataaagttctgaatacaagaaaagtaggaaaaagcgacccgcaaactctagcggatcgtggaagacatatagacgaagaaaagtgattgtagcagaaaagaaagaagcgaaagaagaaaacacaagagtgagagtgagggaggaagtaacgaaaaaatattagccgctcggaagagcacctatatttatgtattgcagtaaccagagtagtatggctactctgttacagcagaagagttttatgaaaaatttgaccaatggagcaaacaacgtggtggtcgtaaatggcaccaacgagaaccaaacgacgacaatggtggcggccgcggctaccacaatggccaccgttcctggcagtgccagccggatgcttctgccacacgaaacgaccaccctaatccatcagcaaccgttgattcatcagcaaacaaccatcaacaattcgttcacctcgacgcattcgcctgcctctagctcgatcagtttaaactcgagcagcttcaatagccaatttatcagtcatctccagagcaatcatcatctgtcgtcgcagcagttattcggcagcaacagtagtcatcagcatattgtgaccacgactgccacacccaccacttcctttcaaagtcagttcaacaatgcctacgtagacgtcaatgcaatatttcgtccagcagcatcacccaccaccactagcaccgctacaatgcagcaaaccttttcgtcaactcatcatccgctgccacatataacgaataacaatagcagctccttagtgtatataaatgggacccaacacagctcggcgaccgtgctgacaaagtcgttgtcgtcagaacttcattctcatcatcaacagactgtatccgagagccagactgccaataccaccgattccgcacggtccacagcggcttccgacggatacggtgaatgtggaaacgggacagatgaacaacctgccactgccactgatgcgacggatggaggaagcctcgatgcgaaatccggtgccgtcgttcccgccagcgaaaaggaagatgaccaagagcaggaagcggaacctgagatcgacattgtcatcaacaatgtggtctgctcgttcagcgtgcgctgtcatctgaacctccgtgatatcgcactcaaaggtttcaacgtggaattccgtcgcgagaacggaatggtgacgatgaaactgcggcgtccatacacgaccgcgtccatatggtcctcgggcaaaattacctgcactggtgctacatcggaagatcaggcaaaggttgcggcccggcgttactcgcgttgccttcagaaactaggttttaatgttaggtttaggaatttccgaatcgtgaacgtgctggggacgtgcagtatgccgtggggcatcatgatcgtcaacttctccgaaaagtacaagaaggatgccagctacgagccggaactgcacccgggagtcacgtacaagctgtacaacccgaaagcgacgctgaagatcttctccaccggcagcatcacagtgacggccgccagcgttgcattcgtgcaggccgcgatcgagcacatcttcccgctggtgtacgaattccgaaagaagcgtaccccgcaggagaagatagagatgctgaaacagcccgtgttcgatccggaactgttgatcgaggaagaatgtgatatcgagtcgactaccgtttatcccgctggagagcagcgagatggcggcgacgacgacgatgtggacgcgtacgatgacgacgaggacgtgcccatcaaccctaatgacaccaaagcaattaaccacctgcgaaggaatagtcgtcgactgtgcaagtcccgctatagcagcttacgaaacggtggtcggcgacgtccatccggcaaggcagataacgaccccaccgaggacgcgatgatcgtgtcggatgacgacgacgatgtcgaggagatcgagagtgacgatgagtagagagatcatgcataatgcatatagtagattcctattttcctctggctttactcaacttgtttcttacccatgttcaggaaccttcctgggcatttagcgaaacctagtaatattcgttttctttattacgtttcatccatattttttctattgttttctaatagaaaaattgtggtttcatgtgaggaacactggtcatagacaacacaaacacatacatacacacaacattgagcaatggagcaagcctgtcctagaagcacatttaccttaaaaacctacaaccaatcctgtgaataattacgattatgtataaaacaaatagccagcatggaatcgaaattattcagtttcgtgaatgtgttgcgccaaaatagggtagccttattttaaagtaatgttacgcgtaagtaaggtgttgccacacgatactcggagtcagtagcgcactgttcaaacagttatcatcatactctcattcgacaccgtctggtcagtgcgagtcaattgccgcagcacgcgaaatgcgttgcgtgtgtgcttgcaattaggatgttcgtgattctggaagagacattaccagaagatgatttaagaaaaaagaaataagagagatcctcgttcgccaatgcgttgagatatttacggttttttgttgcttgtacattacaccgaaagctgctgtatcgattctgttttatccattgtgacactgtcgttcagttgagtctcaagaaatgaatcgtacgaaataaaagggttcctgcaaaatgtaacgtgcacgaaatatggtgttgtttcaccaaacgagctgcgttcctataaacatcagaaacaaacactgaagaatcaccgatcggagaacgtgacgacaaacgcacgggcattaatcacatcaaactactactaaaattaccactatcatattatactagggatattggtatatagcgttggacggaaggtggtcccatatatcatgttcccattcagaccaaaaacaaaatgagagagagcagtaaacgattgatatttccagcgccaccgacgtttttttatttcgaatcaaatcttgtagatatttgtatttattttagatcaagttataaaacaaacatcgagcgcacgagcgttgtgctgttggaatcattgtgtcgtccccttcgcttcactcttatttgtcagaattttgatctacgtttcaattacgttgttttgttaatctatcctgttttcttttaggtctttaattttcttctacaatttttatgcgaaatccaaattagaagtagtggtgaaagagaatattatgttgcaatcgtgatgagcaccacgtcaaaacagaaagctagcgctaaatcaagtaatgtgtaggttgtagaaataagcgcgactacaaaagaaacttaaaacttatgtttttttttattgttttgtttgaaattgctttccagtggtacacgttgttatacaatgatgtacgagaaatttttgtttagttttcagaatgattaaagaaaatctatcgaatagtatcatgttataattgtaattatcaaacgggagagctgcatgcggagcgtaatgtgcttttggctgccctgggcgagaaaatattatctgtttttaattttatgggtcgtcattttccaaaagtggtaatattggtaggtaagacaagtcttaaataaagaatgctagcgatattgaaagcatcgactaaaactaaaacatggatgttatttggaacaaataaaaattgtttcgaggttataagttggtatatgagcttatactacgaggagatctgatctacacggttagtaacgtcattctactcgagagtgattcttctcaacattcgagttctcacagagtgagaacagtgaggatagaaatcttgtgagtttagtgaggtgtcgaattatcccatttggtatgtaagagcgagatgtcactttactcgtataataagtatattggtctagataataattatctcaataattattaattcaatatcctcacttcgtttttgtctccctcataatttctgtcgtgttgaataataatttgtcttattttacgagaagagtgaagtgaaaaatgatggtcacgacgtacggaaactaatcatggaattaagtgattcgctgtgtaaaacaatctgacgctcaactcattcgaatcgaggtttgtcacttgataggtgagaatgagatcatcatggatcgcatcaccaaccattggtgactccaagatctttacattatcccactaacccaatatccatgacaactgtggagatgcaaaggtatactcggcctctagtaacaacggttgtctaactaacattccttgccttccccgatgatcgtaaggacgtggccggcgccgttttttgacttttaaaatttgagctctcgatttgtgcacattgaagaattgtaagctaatcccaagcccaattcattgatttcctgtgcgacttcgatt

SEQ ID NO: 1081 - DNA, 4932 bp, Aedes aegypti
attgagaatgttattgatcccgagtagcatcagtagcaacaacggagaagcaattgcgggtggtcaatcatgctcatgctcgttgaaatattttcaggttcacggagaagagttgcatttaaatatctttagaatagttcttagacatttgttgtcgttaataacggttccagacacaccgtgagtaagttcagttcagcacccagcaacgtggttgatacgtgaacgcatatgcgtcgccctctcgccctccatgtcgccttgttcaactttcttcaccatccctggggctgaatttcccgagtgttcgtaataatagaatatgtagaacaattcgaaccccacaccacgctgctttggccgggcacacggaaagaacactgggccgtttgagttttgccgttgcatcgcgttagatggcgctcaacaaattgtggcgcaaatcactcactcgcgcactgtactgtagtggcccggacattaaagtgttcaccaataacaagctaggcttagtcgccaccaacagtggcgagttgttttgctgcgccctgtggacggagttcccgcaagccatcatttgccattctttcccttgacggattcagttgatggtatagtgagagagcagttcgatcgacgcgacgtgagtccctgagttcgcgaccggtgattgacgcggtgttgatcagtccggaattgaacaatcactgaacgcctaggagctttcgagtgtccgctggccctattacttatgtacgtttctgtggcactagctgattacaaaaattgtgccgtttttatcaaaaactgtttgtggtgaagaaaacgtgtttttttatcttctgtacattgataacaaaaatatcacacggagtgcaagtcgtttcggaggattgttttctatgtagaactttgctgataagttttatcgccttttgtcgacgacctacgtagacgtgctcacgtaaagcacgggtgtgcgcgccttggtgacatactgtgtgaatcttgataacctgactgtgacgtggaagcgtaaatttgctgaaaagtgttccaaacatggcggacgggaccgattctacgtatgatgtggctgcggctgccttcaagttaccagttgttgtgtcaccgcaagccagtgcgcagcatagcgataacagcagcagtagcagctcggccagacaacgacagcagattgaacattctacgatcgatagtgaggcgagcgcatcgcacgaagagaccaaggaagttagtgaaagtgaaaacgcaactagtaaacattccgataacgaggcggtcagtgcaacggtaagagataagaccgatacgttatcaacagagctcgcgcccggtgttgtaggtggtagcggccacacaagtgattctatgatttattcaacgataagaacaaacgaggagcatgtaaacactccttcggtgataacgtctagttctaaacagttgcaagaaagtgcacagaagtacgaatcatatgttaacgcgaatcatcagctgggatccccaccgcgatactccacgttgcatccgttgataagtccaagcttgcatcaacaggtgagttatttcaactacgcggcgcaggaaccgtcgttcaacagttggccctgcgatctttcgtacaaggctagtagtgatattggacgacatcaccacgttcagcatgcggagagtgatgaacgcgaattgaaccatcatcaccaacaccagcaaagagaagtgtactgcagcagtgctaataatcatcattcgcacgattcgcattctcaccagcatccagaccattcaaatttaaatttgaatatcaatccaattagtagcgaatcgtcagccatgaggagtagtctgttggcgttttgtccgccgtatggctcgtcgttagcgcagcatggtggtgaagaattgcaacaccaccaatcgagccatgctcatcagcatggatctgcaatcgatgaagtgattgcggataccttgaaggatgaaagctgcaatattgtggatcactatctaactctcagtggtgcgggtgttgatatggggcacccagggccttcgggagcagatatggcagacgattcgccgcagcatcagcatcatgagctgcacgatttgaaggactacagtgctgcggtttatcataacaacaatgataagagtgtgatcaatttcaaccatcatcaccataatcaccatcagcagcagcagcagaacgcacacaacaatggcaacagcagtggcggcgaatcgcgtagtccttcgggctattcacacgatgagctggacagcagtctaacgaatttgactcagttgatcaacgtacctcgcgcaagtgataccagcacttcagcggtggtggcagtggcgacggcggctgcagcagcttcggccagtatgtaccaatcttcaccggtgcacgaccacacggcggccgtagccctgatgcagcatgggaccagcatctacgatacgctgcatggagcgggtatccctagcagtccatcgtacagtcggtgcggtttcgcgacggcggcatcaatgcaatacttcggaggcagtcccacgcacgagccggttcacatgtggtctccaggggtaggactcagtgagaacgagtacatcaagggcagtctaccggggttccagaggatagctcccagtacgaatgctgcccgagccaatcactatggttccggctattcacaacagtcagaaccagcatggccatcacactacgaggcgagtgcgatcgcttacagcactgcatccagcaataatagctcatcgggtcgacggccttccacaagtgtaccttcgacgacaccattctcggcagccgcctcactgactgcaatgggcatagaggcggacttgtttaccgagggacgagaatgtgtcaattgtggagcgattcagactccactgtggcgccgggacggaactggacactatttgtgcaatgcgtgcggtctctatcacaagatgaatggaatgaatcggccgctagttaagcagcccagacgcctggtaaaagaacctagttcagcgcgacgcgtcggactgcaatgttccaactgtaacaccatgaacacttcgctctggagacgcaaccaggtcggagaaccggtgtgcaatgcctgcggtttgtactacaagttgcacaacgtcaaccgaccgttggccatgaagaaggacaacattcaatcacgcaaacgcaaaccaaagggcagcaaaaatgccgatggaacgtccagctcgaagagcggcagcagcaatagcaacaacaataacagcagcaacagcaataataatggcagcagcaacagcagtagcaataatccgagtagtactagcaacagcagcagcaataaccacaactcaaccagctcgctgaattcgtccgtgctaggaaactctgtgcatgaattgaaatctctgaagtcatcggtgggccactcaagcatcattcagtccacgtcgacgccatccagcgttgggagcaacatgtccccaacgcatcaatcggcttctccgtcacatcacaaccagctgtcgccaatctcgtatacccaacagatcccatctccgatcaccggaacacccacgagtaccatcgttaacaacaataccagcagcatgaataataacaacggaatgggaaaatatggccatcagaaaagtgtcttcatgatgcctccgctaggtgctccattgaccaatgccaacgttatggctggtcaccaatcgctcagcccgatgggttaccatttgaacaacaataactcctcgaacggttcgatgatgagcccaaaataccaccacagtcctccggagtctccaaacagcatgtactacgatatgatggcatcggaagtgaacggtgtcgatcagcacgggttgggatccatcgtaaagatggaaccgatgtcagttgcctacacgtcctaccaccaggctatccatcaacaggttgtgcagcaacaccatcaacaaatgcaacaacatcagcagcatgttcagcaaatgcacagccatagcaggagtccctcaatctcggatgaaaacgatcagagccaccaatcgtcggaaggtctagactgcaagcacaacatcactcgcccaactgtggtttccatgtcgagctaagcgccaacaaagctagaaaacaagagaaaaaaaaatgcaatttaagaatctcatgctcaaaaccaaatgtaggaagaatcgaaaagacttgacagaatagaaggaaatcacgatcacgtgcacaacacgtatgatgattcatcaagaccccctcgttcgagagtgaatccccagacggcagggcagggctctgcatcaaaatggagcttatcttcttccgtaaaagctccagaatttagaagcatttcaacaagagataaggactgcaattagaaaccagaatttatcgtacgctagtagcggaccgagagagtctattcacttttataaaaaccaatcacttaatgttaggaaaaatgtgttgtaaactgcgttataaaaccatagcatatgaacgagtgtgtcatctaatcagctgctttagagtaaaatgaactgatgtgtttgtaaagtttgcttgttgtaaataagtttaaagactctgtttatgaaccaaaaaacctttgaaatgaatgtggatgaatcataggattaggactagttgttgttgtaatcataagcaagctctctaactcacgacaatacttcgtatactttccatggcttagttagtgatttctgatctgttacgctgtatatctctcaacagatagaatcgctatttttatcacgaattcagcagaataccaaatttttgttttacatccgttatttgttaaaaagtaggtttaagactagccaaataaagcactcccttttaagcgc

SEQ ID NO: 1082 - DNA, 1841 bp, Aedes aegypti; identical to SEQ ID NO: 536

SEQ ID NO: 1083 - DNA, 4549 bp, Aedes aegypti
caaagtcgcgcgcgcttcgtagcgatattacgcgagagcaacggagagtgagagtgccgttattccgtcacaagcaaaagaaccgactaaccgcgtggcgaaggcgattacgacgcgatgggttcaaactccactccggtatgaggaaactctcactctcaaagtcatactgtcacccgctcgggccacactcgatgcgaatacgatgaccggtgctgcggtggtgaatcgggtacgtgacgagaccgccctaccccaaactcgccgttacaaagatgcgaccgacacccgaccgacgaaggcaatgatgacgaccggcttgctgtggcgttctgcatgcggagagaatttacgttcgcgagaaagagttttgcttttttatttcgattgataccaggttgcttaatactgttttgcctcacttaagtctaggccatccgactgtcaacagcgaaaattgcgcgcgctctctctcggcggctgaaggctgttctttctcttcctcggttagtggatttggttggtcgttttggagtttcttgatttttgacgtctgattcggacattagccgaagttcggtggtgaagaacggttcaaggaggtgggagaagatcggtgccaagcaaaacagaacaacccctctgcctgtggtgtgtcccttgattggtagtagtagtagtagtagttgtagtacacctatactcaaaggggggctacttgcagcaacccagtagtgtgtcagtcggtgagaaagtgcacagacggcgctcgggtcgacaacgggtgcttagtgggacagagtgagagagacaccgtgattgggctgcgaagaagaagttgttaatatataacaagttgcatcatagtcttaagacttcagtcttaagaaagtgaaccaccaataaacatctttcgcaaaaaaagaaaaaaacacgccgcgacgctgggagcaaacaagctttgggattccgcgcgcacaatctcaagctattttcggaattttgcaatcctgacggtgaattgttttcgtggcacgcgaatccgctctcaaggattttccgggatcgtgcagtaccgttgattagcaggaagctgaattttaccgttggagtttgacgccaggataacaatggattatttctacttttggatttacaaccgaagaaaatgaaaatgtggatattttgaatattctgagtttttaaaaattgtgacggaaatggactgatgatgttttgttgtaaacagtgtgacatggactgaaaaaaaactcgaagaaaaagcagtgcaataaaattatcctcgaaggaaaagtgcaatcggaaaacaataagaattttctcgtgcaattgaacatataaggactttgaagcctacattggaagaatctgtgtgtagtgtctagcaaaatatggaatcgcctcaaatgtacgatacgaatcaaattcaagtgcgaagtgatatcaaaaaattaacaatggcagcgaacagcacaaccaccaacaacaataatgcttcgacgcccaataataacaacaactccccgacggcagtcaaccagaatacgttggctttgaagcagcagcaacaggctcaactgaatcaacacgcacaatcaaatggaaatgcattggccaacgggaatattctgtccaagcagatgcttcagcaaatccagtattcgcagagtgaactagacgagcttacatctcaagaaatttctttggacctccaacatctgatcgatgatcagttccgtgacccggaggccctcggtatcttcaccgaaatggttaccgttggtagtaccaatggtagcgtaccgaaccctttggttcagacagcggctgctaaggcacttcagttacagcaagctcgattgtctcagcacacaaatggaaacagctatcaacgatctctggcctacatgccacaaccagttcacactggtgcaacctatgctaacacttcgagtgacgagaacagcagtgtaggttcttctgagtcagctaacatcaaagaagagcccgtagatcccaacgagtaccgtcgccagctgcagaatagtggagcacagttcatgggtaatacgacctatcagctagcaggcggtggcggtggcgtcggtacaggaaactacgttaccaatggtaatggaaacaccttctcaaacctgactccggccacggtgttgcatcaccaagctttgccacatcttgccggagctgcccatctggcaaatcttaccaaacacaacaaaatgttaccccatgtagcccgaaagtcagttccaaagtcggtagacaaaggaactgacgaataccgaagaaggcgcgaaaggaacaacattgcagtacggaagtctcgcgagaaagccaaggtgcgatcgcgagaagtcgaagaaaaggtgaaaactctcatcaaagaaaaggacctcttgctgcggaagatcgaagagaagaacaacgaaattcaactctacaaacaactctacatgcatctgatgaaccacagcaatccagagatcaatcagatctgccgcagtgcgttgaatctatcaaacatgggtgatcatatgtagatttagtgattttattgtatgtaatcatcttcaccccctcctgttcttcataacgtgaagtggtctgtccctagtttgtagtaaattaaaatgcaaatcgcgcattatttagtggaaatttgtagattgaaaatctttgtaaatataattaaatacctggcgacggggaagattatgtacgatttgtattggaactgatggatatagtttcacttgaaattggaccattttgatgaacgttgaaccaaagacagtatgtgtagaaatgtgttaacttccctttgcaaacgatggggaagaaaactgtaagtgttgagctaagcgaggcaaagctgatttattttttggatggaaatggattacctgtacatatacttaatcaattttatttaccatcttcagctgctaaagtgcaagaaagttatattttctacttaacacaggacagcttccataagacttgtttttattattattatcaccaccttttttaaaagattaatattttattcgtttgtgaatgttgaataaatgtttagaaaacggcttataaaccaagtgttatgtttgctcgacagaaagaaatatttcttcagctgaaattttgttgtttcctttgctcgtttattcgtaacttgagaagattcattgtatagaaaaaatcgtaaaatgcagcaaaatcccaaggtcagtcacaatttgcctcagattatcttctgtttccctttccatggctatctgtatttataggattcactaaatgtatttctttcgtaaacagtgaaaaacgtgatcattaagaaccgaagttaccaatctcagcttgttaggataaactgtgtagaaaatctcatccattcaatcagctatgtaaaacatccatacaaagataaaaagacatctatttatgtatactcttgtatcaagcgaccaaacgcagaaaaaaaaatccaaccactgtgtaaatttaattccgcaaaatccctcggagatcgctgcaataataattttagtagaccgaaatcgaaccagactgataagcaccatgtattgcgcacactggttcagagaagctcggtagcaaaaggtgtaactagaccaattttgcatagagaaagtgatctagaattctagtttgtagtagacaagacaacaaagaatggaaaaaatcgaaagtgacaagactcaaacagccgtactaaatattaataatcagaatagtttatcgaaacacaaggcgacaaagtacctttatttccttttttatgaatattaatgtctgatggagtagatatgcaaatcttaatcatccgcaaacggtgagaatcgaaactaatattcgtatatacataaaactcacagctagggaaacttaagaaaaccgtagaaactgagacggattcgttaccatgttttaggctaatgctatactgtaaacctgtggactactactagaaagtaagttttctctcaaattagctaaatgaacgggaaaagcagtaatttgtttttggatgatttattgaatccttaaacagttttttttcttttgatcttttgttgtcaagtatcattctaaagcaaacgatcgtggatgcaagtttggctagttgttcatgataaacgaaaactgaaaattctattattaaagcgtagaacacatacaaacctaaaacaaaaacacacacacgattatacaagtactgtatttttctcagcttgaaaagtctgttttgaaagtaagaaatcaaataaagaatgtattaaaaagtgaataaaacgaaaacgtgttttcttcatggtggtcttcttttcctcctgtgctaatcctcgtttgtttctgccttgcatatgagtggccactatattagatgccggatcgctcccctcaatgaaatgcagcgtcatcgttgttggcaatgcatcagctgttagacaaaatggatcggcgtcctgtgaatgcaaag

SEQ ID NO: 1084 - DNA, 2947 bp, Aedes aegypti
ctccggtttccatccgttcagtgatcaggatcaagaatatcatcaagggaaaagcgccgaaaccgcaaacatgggagttccagcattctttcgctggttgtcgcggaagtatccttcggtcattgttgagtgcgtggagcaaaagcaaaccgatgaacacggaaatccgctgtatgatgatatgacccaaccgaacccgaacaaggtggagtttgacaacctgtatctggacatgaacggtatcattcatccttgtacgcatccggaagataaaccggccccgaaggatgaagacgagatgatggtggccatctttgagtgcattgaccgtttgatgaacatcgtccgaccgcggaagttgctctacatggccatcgacggtgtggcaccacgagccaaaatgaaccaacagcggtcacgacgtttccgagcctccaaggaagctgcggagaaagctgctgaggtgcagaagattcgtgacgagctgagggcgaagggatgtattctgcctccggaaaaggagaaaggggcccatttcgattccaattgtatcactccgggaacgccattcatggacaggctgagcaaatgcctccagtactatgtacacgatcgaatgaacaataacccgggttggaaggggctgaaaatcatcctttcggatgcaaatgtccccggcgaaggtgagcacaaaattatggactacattaggaagcaaagggcgcaaccagaccacgatccaaacactcatcacgttctctgtggggcggatgccgatctgatcatgttgggcttggccactcatgaaacccatttcaccatcatccgagaggagttcctgccaaacaaggaacgtccttgtgacatttgccagataatggggcatgaaatgaaggattgcactgggctgcaatcggagcgggacattaatcggacgccacctccccctggggcagagacgcagtacattttcgtccgtttgaatgtacttaaggagtacctcgccaaggaactggacatgcccaatctaccgttcaagtatgattttgaacgcgtaattgacgattgggtgtttatgtgcttcttcgtaggaaacgatttcctaccgcatttgcctagtttggagattcgtgaaaatgccatcgatcggctggttacgttgtacaagaagtgtgtgtacaagaccaagggttaccttacggattccggaagcgtaacggttgatcgtgtcgaactcattatgacggatcttggctatgcagaggacgagattttccgccaacggaaagtcaccgaggatcgtttcaaagagcgcaacaaacgcatgaaactgcagaaggagcgagaacaacgtcccaatttcgagcaaatgaacaaatcccagtttgctccgactcccttgggacggggaatcactccccaggcgattcagaatccacgtcaagaggctgcacacttccggatgtttggcaatagcagcaatcaacagcagagcaattccaacaacgatcagaaccgacgcggtcagaaacgtaaggcggatgaacccctaactccagcagccgtcgaagaagcagaaacccccgatgaggttcgtttgtgggaagatggcttcaaggatcgctattacgagtccaaattcgatgttgcaccacaaaacatgaagttccgtcaaactgtagcatgggaatacgtccgtggcctatgctgggtacttaaatactattaccagggctgtgccagttgggaatggtatttcccgtatcattacgccccttttgcgtccgacttcaaggggctcagcaacgttaacactcatttcgatcggggcactccgttcaaaccgttgcagcagctgatgggcgtgtttcccgcggccagtagaaatcacgtcccaccggcgttcgccgagctgatggtcgatcccaaatcgccgatcatcgatttttatccgatcgatttccacatcgatttgaacgggaagaagtttgcctggcagggcgtggccctgttgccgtttgtcgacgaaaagcgcttgttcaaggctaccgacccgaaggtcccgtcgctgacgcacgaagaacggttacgtaacgaaaacggcctggctcgcttgtacctgtcgcccggaccagacgcgtacaaattggtcaaaggtttgtataatggctcagtggactacgagcgcgaggttccgattctggttgactgcatgcgtggtatcgtaattccgaccaaggaaaacgtcacacacgatggggtgcttccatcgcccattcccggcctgcatccggtgtgcgagaacaaagttctgacggtgaaattcctcgacccacagtacgcggatgatttcgtgtacccggcccggaagctggagggagcccgggatcagcccaaggtcctgggagcgaacgagggtccggtgatcgggtttggacagcgaacgaaccgaggcggactgggtagcgctggccaccggatgatgaaccattacgttggtaacaatagaggaggaggaggtggcggcggaagaggaggaggcggaggcggtggacgcaatgattacagcaatttttcgagaggtaataattcatcaaatagcagcaacttcaactcgtcatcttacacaggcaacagtatgaatacgtcatcaaacaataactactcgaacaattcgaattctggatcgagcgaccgcggtggttccagctccggggccaacttgagcgccttcgagcaactgagcagccgtatcaatcaataccagcagcaggtgatgacagggatcggcaaaacagtggtggatatcagaaccgcggaggcttccagcagaatcacgggcagaaacgctggaggcaatttcggtggcaatcagtacgggcagcgcaatcaaggtggccgattcaacaacaacttcaacaatggaggcggaggcgagagccagtaa

SEQ ID NO: 1085 - DNA, 5739 bp, Aedes aegypti
attttctgctcgggctgtcaaagaacgcaaactcgccaaacgcactccccggacacaaaccctgtaacatcggagccactcacacagcaccgcgcatgcatcctgctgatcaccctatcccagctgtcagttatcggctacctcgctctcgcacttcgccccgtcgtgttcgcggtgaaggatctgcctgtctgtgccgtgcttctcatcgccattgtgtgtattgtcccgcatgaaagtctcgtattttgcaccaatttcccgtgcaatttgtacttttgttcaggtacaaagtgataaagttatagttttccacgaagaaagtgtaattgtagcggaaaattgcgctcgccgcgtgttttcgtcagggcgcactgaaatcttttttttttgacatcgccaaacgtcgtcgtctttcgttgttgttgtggttgtagtgtttttctgccgtgcgtgcgataaagatagaaggcgcaacgacgagctctcagtcagtcagtcagtgtgtggatttctcggacttgtaaaaatttctgcttcattccgtgttggtctggtgtagggattgtgagcacaattttcggttcggttttgtggtgaaactctcggttccatcggacaatgagcgtcgaggtggaagcggccaatccgcaggataactccaccaaacaggtgaacggcgagtcggcctcggatcgcccgaatggagtgagcaatggccactcggagggcggcggcggtggctccagtgacgatcgccgcaagagccacaaaagctccagcaaggacaaacaccgggacaaggaccgggatcgggatcgcgagaaggacaagagccgatcggacaaggatcgcgatcgcgacaaggacaaggaacgctcgaaggataaggaccgcgatcgggacaagcacaagagcagttcatcgtcctcgtcaaaggacaaagatcgcgataaggacaagtccagcagcagtagcagcaaggataaggatcgcgatcgacatagcagctcgcacaagagctcgagaagcgataaggatcgcgagaaggacaaggagcgatccaaggacaaagacaaggaacggtcaaaggacaaggatcgggaacgagacaaggacaaggagcgttcgaaggacaaggatcgggagcgcgataaggatcgaaaggatcgcgacaaggataagtctagcagcagcagtagcaaagacaaagaccgcgacaagcacaagagtagttcatcttcctcgtcacgtgataaggacaaggaacgtgacaaggagaagagcaagagcagtagcagcagcagtaaggataaggacaaacattccagcagtagtagcagcaaggacaaagatcgtaaggaccgcagcgataagcattcctcgtccaaggataaggatcgagagagaaaggaggaaaaggtcaaggaggagcctgctgaagtgaagcaagaacagcaggaagtgaagcatgaagagccaagcgcaatgttcaatggtgttgctagtaacgaatcgtctcaggatgtttccgagataaaacaggaggatcctctcagcatttcccaggccagctcctgtgactactcgatgtcgcagttccgtgctgatgaatcccagtttgtcatcaaggaggaagcttccgatcaggatcaagccgaagaggaaccggaagagcccactccgatggaagttaagcaggaatcggattccgaggatgacgttcctctgtcgaagcgcaagaaaaaggacgacgatgaggacttcgatggcggtagcaagcagaaaaagataaagaccgagaaaaaggacaaaaaggaaaagaaaaagaagaaacgcgcctacgaatctgaggcggaggaattcgatgaagaggaagacgaggattacggtgccgccaagaagaagaaacaggcgaagcaagttaagaaagaagtcaaaaaggaaaccaagaccaaaaccaaggtcaagaccgaggtaaaacaggagactgccagccccactaaaggacgcaagaagaagcaggaagaggaggaggaggtttggaaatggtgggaggaggaaaagcgcgaagatggtgtcaagtggaacacgctggagcacaaaggcccggtattcgcaccgccctacgaaccacttccggataacgtcaagttcgaatacgacggaaaggtgatcaagctttcgcaggatgcggaggagattgccggcttctatgcccggatgttggagcacgagtacacatcgaaggacgctttcaacgacaacttcttcaaagactggcgcaaatcgatgacctcgtcggagcgcgaaaagatcaaggatctcaagaagtgtaacttccgctccatgcacaaacactttgccgaaatatccgaagccaaccggaatcgcacgaaggagcagaagctagccctcaaggaacaaaacgaagccctgatgaaggaatacggaacgtgttccatcgatgggcacaaggaaaagattggtaatttccgtattgaaccgccaggtctgttccgaggtcgtggtgagcatcccaagatgggtatggttaagcgacgagtcatgccggaggatgtgatcatcaattgcggcaaggagagcgtttggcccaaagccccggaaggacaccgttggaaggaagttcgacacgataattccgtctcctggctggcgtcctggacggagaacgtccaaggccaagtcaagtacgtcatgttgaacccaagctccaagttgaagggcgagaaggattggcagaagtacgaaacggctcggcgactgttgaaacacatcgacaaaatccgggacacctaccgcgacgagtggaagagcaaggagatgcggatacgacagcgtgccgtggccctttacttcatcgataagcttgcgctgagagcgggtaacgaaaaggacgaagaccaggccgatacggtcggttgttgctcgctccgtgtcgagcacattgacctgcacaaggaactgaacggcaaggagaacgtggtcgtgttcgatttcctcggtaaggattccattcggtactacaacgaggtggaagtcgagaagcgtgtgttcaaaaatctggaattgttcaaggagaacaagaaacccggtgacgatctgttcgatcggttaaacacctccgtactgaacgagcacttgcgtgaacttatggaaggcctcaccgccaaggtcttccgtacgttcaacgcgtcctttacgctgcagaaccagctccgcgagctgaccgatccggacatgaccgtgccggagaagcttctggcgtacaaccgtgcgaaccgggccgtggccatcctgtgtaaccatcagcgggcggtgccgaaaacgcacgagaagagcatgtccaacctgaaggagaagattcgggctaagcaggaagcggtcgaaacctgcgagcgggagttgaaggacctcaagaagagcaacgttcgcgacaaggtcgccaaagacaagaagcagaagcagctggaacgccttagggaacagctgaacaagctcgaactgcaagagactgacaaggacgagaacaagacgattgccctgggcacgtccaagctgaactatctcgatccccgtatttccgtagcatggtgcaaaaagttcggtgtcccaatcgagaagatcttcaacaaaactcagcgggacaagttccggtgggccatcgacatggccgatgagaactacatattctaagctcacaaaagaaagaaacggatcagatccggtatcccctaactgtgagatatcgtgtggggtctctccgatagtgtgtcgtaatagtgtatcgtaaggtacccccaaattctggcaactttaatatctgatgatccaaaatgtttcgtttttagaatcataaaagtttttttagtagaaaattattagtgcccattgcttttttttttgtttttagtctcactccttgtgataagatagggctattgttcacctagaagcacatacccacccacggaacactaatgccacagttaaaaggaggggaattgctgttcctttcctggaatagagtgagacgttccgcgcagttaaatcagttttgtaaaaatctatgtatttatttgagagtaacattataaagtcccccgatataacacatagcaagttgtcgattccttttcggggttggcgatgattttttaaacctttgttcggaaacgtacacgtgttggaagtgaagaagccatccgcagacatcaagagttgtttaggaaactagtttaaagaaggatatttttataattattaaaacaaaaaacaagcattttctcgattaggaggaaatgccgtatatttttataatttttgtgaaacttccgtcagaaggaaacctttccatttcatcacctcgcctccctgctcctagaatagcagggatcggggcataactatcgttatcttacgccaaccaaccacattttgaatgccagcagtcaaggtttatttatttcgagagagctaaacagaaagagcataccttagttggaaaaattccctttcttccttgcatggactaagtacgtacctatgtttgtttgattcgttttctctttagattgtaagtagtagcaattacatattaccaagtgcatatgattgatgaagcaacagtacagaaatttgcaacgttacagcgtgtgattttgaagacgagccaggaagagtttctttttttacgttccctagagaatagtttaggaagatggaataattgaataagccccaagagtgtgatttgctttggaaggaatgatttaatcaaattagtgcccaaaaaattagaagccgaaaaattaagacagacagtgtaaaccgagtggcaatgaaatggaaaataacttgcgatacaaaggttcatatttacaaagcagacaaaagaaaacatatattagtagcccttagtaggtattattgaaaaagtaattaatcaaataaacaacacacccctacaaaccacaaataataccataattaagaaaaacgtcatttccgtatagttctcactgcgtaccatgcgcagaattaccttgctaagaaagaggaaacaactccgcagcagcaacaaaaaagtgcagtaaaacgactagatttaaggcaacagaggttttaaacgcgtaagaaaattgaaactccttatcttaacgaaagtcaaccattgacaaaagcacatatgatgaagcagaacgaaaagaacacaacggcgatgagaagatgatagtagcggtaggacagcattattaaacgagaagagtaaaattacgtcttgagaacggtcccagcaacacaaagagtgttctttatgaaagacattctgggagcccttctcgtcgaaccaccaacatccacagactactaaatcatgcgaacactcgtacacacatattgacctatttgaaataagttaaatatctgtaggttgaacaatcaagaaaaactggaaaaccgcaaattgtgtgcatcaggcaaaaaaaacactaaaataaaattccataaaaattgaaatggtgttcaaatttaccgaatacatggaaaatcttcgaaatccttgccagttacaggttcactccaattcttagcttagcttctttacaaggggttaatctgcgagcagaccaatgagaaggtaactcaggaagcgtggggatgccgcaataccgacgacccactaaaaccatccgaccaccttacggtatttcttcg

SEQ ID NO: 1086 - DNA, 7672 bp, Aedes aegypti
atgcagtttcaaggaaatggacaaccccatccgggaggtttccgcccacgtggtgacaagcccgatttctacggcggaaacggagtcccgggaggcaaaccaccacactttatgagcaaaccaggcggaccaccgtcgattccgcccttcaacccgaacggatttggaggaccgaaacccatgtacggcagtggcccgaatggaccctccggtggacccggtcggttcaacaagttccgcccaaacatgtacggcggcccgacggaactcggcggaggaatggcaccgaagaaggactttggtggacctaagatgttcagcacgggcgccccagtaggcatgggcgcgatgaatggaaaaccgatgtatgacaaacctttcgatgcattcggaggtcctaaaaagtacaacaccatgccaaactcgtacggaaacagaaatggttatggtccaaagccagattttaacaacatgagcaaggaagaacgggccaaaattcaatcgctgaaggccaagttccccggacaaggtctggtgaagcccatctggaaggacctagaaccattcgagaaggacttttatgttcctcaccccaatgtgatggcccggactccggaagaagtgcaggcattccgcgagcgtatgcaaatcacagtcatgggcaacagcgttccccatccgtctcaagactttgaggaaggcaatttccccgactttgtcatgaatgaaatcaacaaaatgggattccccaacccgaccgccatccaggcacaaggctggcctatcgctctctccggtcgggatttggtcggaattgctcagactggatcgggaaaaaccctggcatacatgctgccgggtatcgtccatattgcccaccagaagccactgcagcggggtgaagggccggtagtgttggtgctggcaccgacccgtgaactggcgcagcaaatccaaaccgtggtgcgagactttggcactcactcgaagccgctgattcgctacacctgtatcttcggaggagctctgaagggaccacaggttcgggatttggaacgtggtgttgaagtggtgatcgccaccccaggacgcttgatcgatttccttgaacggggcattaccaacttgcgtcgttgtacatacttggtgcttgacgaagccgatcgtatgctggacatgggcttcgaaccgcagattcgtaagatcatcgaacaaatccgaccggatcggcaagtgctgatgtggtccgccacgtggcccaaggaagttcaggcgctggccgaagacttccttcatgactacatccagatcaacatcggatcgttgaatctgtctgccaaccacaacattcaccagatcgtggacgtgtgcgaggagggtgagaaggaaggcaagctgctgtcgctgttgaaggaaatttctagcgatgtaaacagcaagattatcattttcgtcgaaaccaagaaaaaggtggaagatttgctgaagaacatcgtgcgggatggatacggtgcgacgtcgattcacggtgacaagtcccaatcggaacgtgattacgtactgcaagatttccgccatggcaaaagcaccattttggtggcgaccgatgtcgcagccagaggcttagatgtggaagacgtgaaatatgtaatcaattttgactacccgaattcctcggaagattacattcaccgaattgggcgcactggccgttgctcttcgtacggtacggcttacaccttcttcacgcccggcaatggacgtcaggcacgcgaattgctttcggtgctggaggaggcgggacaacaaccgactgctcagctgattgatttggctaaacaggcacctggtggtaaaggtggcagaagccgatacaacgttcgtggtgcgttgacttccggaggatataatcgagatcagaatggttttggaggtaacaggatgttccagaagaagccattcgagaaccgattcggtggtcctccagtcaatggaatgggacctaatcggttcaacaacccgggaccgaacaaatacggcggaccaggaggctaccgaagtgaaaacagctggaacaagaacactggaggttatcaggccgtgccatcgcatcagactcagaacggaactccacagcagtcaccgccacagcagcagttgtatgaacctcaccagcaaatgcgattccattcgaagaataccatgtaccagaatccgaatcaatacgaagatttctccaaccaaatggtcggaggagctccacaagctttcaacggtcatagcggaacgcgtttctactcgaacaagccccatcagggcacaggtggaatgcagcaaactcaacttggcggtcccggtggccgttacaatccgaataaccaatacaacggtgatgtcggtccgaaacccgctggcggacgtcccccatatcaaccgaagcaacaacagtttaacaatagctatgccgccgctggtacggccaacccatacccggcgcaactggctgcagcagctgctgcggccgctgccgctgtcggtggcggacaaaccattccagctgccgggtttgctaccggatttgatccgttggctggcgtccagggagcgatgggtacgttcacttcttcctatcaaattccagctgctgcagcttactattcgtatcctgcggccgctgctccaccgccgccaccacagactcaagccccgccggtcgttcccccggttcaacagtaaactttccgctttcgaagcgatcgaaggtatacaaacacatatatacaacatatattgctaagcatgagaattcaatttttcagcataaaagctcgttaatttccatacttttaacttattaaccgcggaaggtgttcgttttttttgtgaagagtaatcttcccccctatattagtaattgcgcaaaatgtgtgtttttctttacacctttcgtaaaacatttagaacgacttcaattttctccctgatctatatatctattatgtgaaagcattctattggaagaaatgatatcttagaatacaataattgtgaatctaattatgaaataacaacccgtttgaagtttggataaaccagaaagcgattaaaatggatgttttcgtcttaaggagtgtggtcgatggtggttcacaccatacgacccaagggggggaggttgcaatccgcaagccccccccttttcacgtatgtgtgttagatcgtaagcgtagttacatacctacacacccacagagacacacaaaatatacacgctcgaaagccgagagagagaatacacattaatcttaatacttcaatacacacacacgtatataaattatattattacattcaggcattggtagattacaactatttattgaacgaggaaatattcatacctaagcagaacgacaaaaacgctatgcattttccaacgtattcattaggttcctttccgtttcgagttattataatacgatgttagtgttttttcttcatttttcgagatactacttcttattattgaaaacgttagggatttttctttcggtttgtagtgttttgctgaataattttgttcaattgatcgatatgagactagggacggagcgattcgtaagctgatttgggacaaagacgtgatgttttgattaattagcaagtgctgagaatttttttcaaaacagactgaaatattctgaaggaaatagttcgtcactagaacagagttggtagcaagtaatttatttcgacttagtcaccagactaggaagtagccataagctacccgaatgcaaaaaccgataaattagaacaggttagaatagtatgacaagagcaactgcggaaatcatgtcggaacagttagtataccacactcagctcttagcgttgtacatccttattcgaaacgcttgaagcaacacctttatcttcaagcgctgttagttaatttacgcattagtttgagacagcagccacctcttcagccatccaatttgtcatgaggagccgtttcgtcccctttctatcgatctagaacaaagcaaatcacgaaatcattcgaaaacgaacaaccgtgtcgattagcagctgtgaataggaagtcaaatttcctgctaaacattcactaaactcatgcaaaaaaacacttccacgatacacgtattcattgtacgacacggcataatatagaaaagggtgtgacaatcggttctattggtgagattcaaattaaaatgtttctcactaatagccaaccgtgtctttgggaccccagggtccgcacgtcagagattccaaaacctagcctcctttccatatccaaagtatgtatgtgaaacgtttggtacaaagcaaaaagtgtgcaaaaaacgaatgcaccgaaatccgtaaaaatggcatggaataagtggccagccagattagagtaatctacaaaagagggcgcattctgagttcgtatagagaattccgcctgagaaagcgagagcaaacacaaacagaaagcttattctaacggaaaatttcgacacaacataacactatacaacgcaatcagtgcggaaacagaaaagaaaaaaaaactgtttcttcagtaagaaccttttcataccgacgaacgtcactgaatcgtggtgacgtttggtggtaatttgctaagaaatacgaacaattacaaaggaaaccaatctgctacctaagtaaggagataaacagaagaagcgtaaagtgaaaaagagtaaaagactagttgataactagatactaatgagaacggataggcaaaatcgataagagcaattagagagacggcgagcgcctaagatttaagcgaagttaaagataataacttgtgtgataaacgttgatgtcacttgtgagaatatgataatgataaaataacaactgaaaacagaagtacgcaaacaaaactaaacaaaaacacacaatgaaggcaagagacttgaaaacttttttgttttatttaatgaaatttgtgatattcgttaatatttcctttcgcatcctgacacatcgcgccagcattttttagaacgcctaaacccctctgtaaccgagagagagaaagtcgagaaagtaaattcgcgcgcgtaccatttacaaatacagaaacacatttaggaagcatgcgaacaagtccagagcggaactgggtcgcatccgaggcgtccacaaaaccgtttgaatctgtgtaataagctataaagtaattttagaggccacattcctttaaaagaagcaaactgctgcgagtgccgctcagtggtggcttttctcacagtagtcgttagtttattttctctcattgaaaacacaattcagtacctgttcaatcgaaaagtaaaatacgagaatcatgcaaatcataaacgcgaaacgtagtggacgatagcaaagcgaataattgaaagacgaattttaatttaagcatcaatttgagatgaaaaatgcaaactattcaaattgtttatgggaaaatgaaatggggcaaaaataacagtaatcaacagtcgtcagttgaaaaccgtagtagttaaaaagcatggatttccttctcacacaaatctagtccgaaacaaactgttgtttttattttgtatttttattaatatttatcatacataggggaaatccaaagtgtgataaagcgaatagcgccactgtcgttgtaagctgtggcatttttatggttctttttttgtgcgaaaaaataagaaaaacgaagagatgagactattttcatcaaatctcgatgaagatgcgaaaagtaaaagcaaaaccaaacaaagcgtaatttaggaaaagatagaaggacagcacgcgcaaccaatcaaaaccactagaacataagtgaaaatagaactgagagtgttagtcttcccgctagagggcactcaaaggtattttcacctgcatcgaacaacgagtattttctcgttaatgtgcgcgcactgttaataaatgcatggcatccacatgacatttactagcacggaaatcaaacgatagatgaaaagcaggaaacatgaacggataaccataaccaaattgcctttaaatgaactgtgatcgtatcaaatctcgtctcgttcctttttctcatcactttgttgtaagaggacaagatcgtatcgtataagtcccctttttcgatggggacaaaaactcattttttacaccttcatttgttatatcacctataaatcgactatattttttgttatttacaaaagctaataagtactagaacaaatacattcgtgtgtgattcggagttgttcatactctggctgactgattattgttgtttaagaactactagttagaaatgattaaaatacattcaattgacacaaaacgaaatgtatgccaaaagtattcatattgatacacaaaggaaatttaatttatgtttaaatcaaaacgaaatgaaaaattaaaattcgtcaaattgttcctaatcgaaaaccacgtggtatttttagttctcataaagctagaatcattaaacaaacctatgataacgaaacagaagaaatttacttctcgagtaccgtaacaaacaacacaaatgttgcaataaaacaaaaaagttaaccagcaaactttctttcacacaaaaacaaacgcaggcaaataaaaaaaagccggctgtgttcacttctaccacaaaataccgaaataacaattttgtttcatgcaagattggtactcttgcgctttccattgggtgatattgtgataaccatcggagtatgtcgtcgtagaagaaagaacaagagtcattatcgatatatgaaacaaacaaaaaaaaaactcgcatctgtgaaaaatgacaactgaactaacacaaaactagacacacaaaagaaaaacaaacagagaagcaaatcgggtaactttgtaatacagattgttgtttgtaagcgaaacactataggatcttgacaattgcgcgagccgagatcattcggaaaattttgcaaaccttatgcgaaggttttgcgcggttccgtcgaaccgtgaccccactacagtaaaacaaaagaacactttttaggaatatatgaaaatgaaacacttacaagcagaaaaccaaacgctcgcctctctagagaaaccaacaaacattgttgattgacgaaggaaatcgaatcaaacgtcgagaaaaaaaatgttttatttatcgtaaaacataagaattgtatcacttcttatttatggagcaaacacgccagatacattttttcgtatccaaaaaagcaaacacaaaactacgatctgtgaaagtatgatgaagcgtcgtcatgaaaaaagattttttttattgaaaaatgcataaactgtgaaatctcgcgtgtgatgaagcggaaacgatttagcaatcgtattcgacagaaagaaagagagaagtgtcttcgtctgcgcgtccgatcgttggttgggatgggactttggttctgtacgaactcttatacctactttaccaccgtctggcgcctttcgcaagcgtctcacatatttcgctccactggcagatactgcttagaagaaccggaaaaagtcagaaaaccatgaatgaaaatcgtttaataaacaaacaaccgtaaactaataaaaatttatcaagtttaatgggcaaatt

SEQ ID NO: 1087 - DNA, 4214 bp, Aedes aegypti
ttcaaactgacagcataattgaacgaaaatgcaaccgcaacacaacacaacacttttcccttcgctgtgtggatgataaaccgaacgcataaatggtggaggcagagtaagaaaaagtggatttctaaatagaattttcattccgtcaaattcgcgagaaaaagtgttgtgtttttggttaaattgtgtccaatctttgcgaaaagatgtccggaatcggtgaattgcatcgaattgtagcaaaaggctacaattggatgtaaaagtggacttgaaacatcttaatagcaatccgtcgccataaagaaggcaaagcgtatattttttcccgaggctctcacagccgtctgcgattcaacctgtacagtttttggtcttttagctttggtggtgtgcgtgcctgagataaataaatacgggccagtcaaagcagtgttcgtgtgcgggactgcaaatatctgtacaaagcaaaagaacgtaaatggtggcgcttaaattgtgaataaaaaggaaaaatcagttcgctcttagttctgacggcagcaatttgcgggcctattaaaacccggaatcatggttaaaggacgtcgaactcgccaaaccaacccaacgggtcatctactcacatcttcttccgcagtcgacgacacagccagtcctaaacgcaaagatttcaagttcgacaatttgtcacatttcaccagcaatgatacatctgcggccgctccaatggttctacgcggaggtcgtaccaagattaatggaattgctaaatatctgacgaccggtaaaccttcggctccgatagaaagtaaatcatcatccacagcacacaatttcatcgatcttaccgatgataatacgtgtgattcgttcgagaatgtggccagcggaagtggaaacgccttgggaggacttggttttagcatgattcaaagcaatccggcaagcaacattttcctgcaggaaccggtgcttagtttgaatttcgacaagacgcccacagacaagtcccgcatggtcattaaaaactcgttcctgtcaactgaaatccaaagtaaattctcgccacccaaatgcgacccgatgtggggaagtgccgctgcatcagtatcaatcaaaatcgaagcgtcggattacgcactggacttgtccaaaccgacacaagtaacggaaattgactcgacgacgttcctaaatcaagacagcaattcatgtgatagcggtgacagcggagtggtcatcttgccaacaggcaccctggagtcggtgggatcggccgacgggaagcgtcgaaaaccagcaactccgcatcgcattctgtgcccatcgccggtgaagaatccactcgtggctagcccgtctacggcactggcacacttgaacattcagagcaagaggaccacccggaggaacgtgaaatccaagcgaaggcttcacgtaaaagaatcggaaaacgcgctggaagaatcggaagtgatcagttcagtcgatatcaatattctgacaaccacgaccactgagttggataagaaaaagccggtcttgaacgattcggtcaatcctactgcacagcagaataccaacaataaccaaagcagcaaacaaaccgaggttccttcagctgtgaccacaaatgtcggcaaacacagcggtgaggcaggaaccaacacaaagctgaccgatttcttccaagtacgacgaagtgtgagaaaaaccaaaaaagaagttcaatgggaacgggaccgcgatattgaaaaggctattcgcgaacagcgggaatctggtttgaagattcaacactttgaagagaagggacgtggaataataacgacaaggccgttcatgaagggcgaatttgtagtggagtacatcggcgatcttataacagtctcagaagcgaaagaaagagaacagatttatgccgaagacgacaacaccggatgttatatgtattacttcaagcacaaaaatgtgcagcactgcatcgacgccaccgccgagagtggaaaactagggcgtcttgttaatcactctaggaacggcaatcttatgaccaaaacggtttccctgaataaccgacctcacctagtgttaatagccaaagaagatattgcggaaggcgtggaagtgacttacgattacggtgatcgttctaaggaagctttgcagcaccatccctggttggcgttctagagacgtgcccctaccggtcgtaggcaaccctataaagctttttcctattcaaatcgagcaaaaccatatttcagagccaaccacccgccatatagttttgtgctgaaatgatgaatgagcaggaaacagcgaaatactgtaagcattttgatgttcctttcaattcccaattatggtacgaaaacaatagtccacattctagcagggatactcttgggaaacgaaacaaacaactactttatctcgtgcactgtaaataatttaattctaagcagacagtgatgctaaagacagtacagatcatcaaattaatccattttacagaaaaaaatgcataatgctctttactgaagagatttgttggaatgcaaacacttgatttttacagtgaatgtctagatatggctaaattatgtgtcattttttcattttccttttactttttccatatgctttgctgcgtttgtgataatagataaaaaatatcatactttaaacacaataataaaacaggatgaatcttccaacatcaattcattagcaatctcatcatatgtcaaaaactaagttgctcaagggcagctctttcaatgccgtacctacaaagtccccaagaaaatagatggaatgcagccttaacacaattcaaatgaccagttaagtgttcaatacgtactttcactattgttaactgagaattttctgcatcaattggctattttttgcattttgtatattgtgcggcaagcacaaaagatattctttgtacaatgggaaatcaagttttcttggaccgaaccgggattcgaaccttgattgtgcttgtacttatgctgcaaagtcaatgaaaaaaagttgacttgcacgtatttgactgacattggcgtctatcaaatcatgagtttattctacgagtggaataaaggtaagaaaaagtaatatcgactcgaatgaagaacgctcaaacaattactcctctcagtcgagttttgtcacttatcaggggagagctcactagggaagtgagaaatatcgatctcaacaaggtgacaattaagttctaaccctcgactcgaacgtgcacagagcgtccagtggaacgacgagacatttcattctggacgcctctcattcgagtcgagtttggtcacgtgtgagaccgagatttctcgcctcactccactcttaagctatcagaacactatagcaaatattgggcttggattgatacagacccaaacaaatgtttgacaactctaagattttgtcagtgttgaaaccaatgttggtctgttggtttatgcctagccaaatatttgcacattcggcaaagcgtgtactgatagctttagaattcgaataaataaatagcaaataagcccaggccaagccatggattcccacacgctcaagggccaactacgattaagtgtttccatcgtggagtggaaagagaatcttaaaatgcatcatgatatcttagacgcaatattgtttcattatgaccttctctagtgaagtttaggggatgtgtagcagtatccaagaagtcttcaaaatcgagttccagcgccgttaccgtatgctggattctagttgcaacgtaaagaggtgtggtttcactctacctagacaccattcgccgaatatttttttcattgctttcgtactaagttactagcccactgaaaactgccgtactttacacgggtcataatattcgcttctctatacatttgatataactcgtaattaatacgtgtgcagcatacatcattttctaatcttcgggcgcaccttgatgagttcagcattggcattctcaatctcgctcaacgagggggctggttggtcagcagtcagcatcattcaggtgtttattgaagtgctgatactacctttctatcaccttaatcttcttctttgttcttatgtaacgtatccaccgctacagagtttgattcccaatttctagttcttatgatcacttccacagttattaactgagagctttcttt

SEQ ID NO: 1088 - DNA, 1128 bp, Aedes aegypti
atgaatggacaaacaatgtttagtatggcccgtgcgcctttgaaatcgagcttttcgatcaactcgattctgccggaaactgcgatgacgacttcgccggcacatacgccatctccttcgcctcattcgtgccattcgccaatcggatcggaagaacaggatcatgatctgaccgataccgagtcggatttggatgttaccggaacgccgccgccaatggattgcagcaataaagaaaagtcagatgaaaatgaagatggtgcctcaagtcccaaggacggtgaaaagaagggtaatgaaaaacctccatacagttacaatgcgcttatcatgatggccatccggcaaagtgctgaaaagcgtctaacgctaaatgggatctacgagtatattatgcgaaacttcccatactaccgggataacaagcaaggctggcagaactcgatccggcacaatcttagtttgaacaagtgctttgtgaaagtgcctcgccattacgacgatcccggcaagggtaactactggatgctggatccctctgcagaagatgtattcatcggtggatctaccggaaaacttcgccgtcgttcaaccgccgcatcccgaagccgtctagctgccttcaagcgatcactagttgggccaatgttcccgactctgggctattctcagttcaaccaattcatgtatccgtcgcctgcccatgcacaaacggccctgttggcccaaatgtactcaaggtatgccccatatgcaccaagtatagcaccgaagcctgccctgccacttccgctaccattatccgtcggtgcaccaggattcggcatggatcgactgttagccgccggggttgcacctcagcttacgcatcaaggaatctccccgcatcaacaagcacaagctgaactctaccaaagacttcagtaccagcaactcctccagcaccatgctgcccaggcccaggctcaagcggctcacatgcagcagctaagtcctacggaaaatcatcaacagcactcacccaccctgccgaatcagcctccttcagcaaccaatagtttatcgcatcaaccacaaggatcgccgacgggaccgaccatcttcaagccaatcccaaggcatagctga

SEQ ID NO: 1089 - DNA, 3267 bp, Aedes aegypti
tttcactaacacaacatctctcccccgcagtcgcaaaacatcaccaatcaacccctcataaaccgtacagcatttcccattgcgtaaaggaaaaacgatgggttatcgtagcacatgctcacgcacacaaccaaaagccaaccaccccgcacgacgatgacacaatcaccaaccgttcgaaagtcgcaatatttcccatgccgaaccctgcgcatttcacccatcctccaccacactttccatctacatacggacaccaccacagtgaccaagaaggaaaaactcgactttccatcggacgactccattttctcgttttctcgcgactcctcacgtacgacaccagaaggctccctcaggacgacgacggttcggggaccgaaagactgaaagtacctgaaggcccctgattcgcgattcggagtttcccgacctgcaacccaattggcaactcgggactggtgcagaagatggtgatggtgattgagtgttgtggcaccaccatcagaagcagaagcagcagcagcagcagagaactttgcagtcgtggagacggtcgcttctagtgccccggaagcaggagaagaaagcaggaaaatgaatccagaaacatgagaatctagtcaaatacagcatcagcgatctaccaaaactaaactaagcttaacaaaccaaaaatacaagacataacgagagagagagagaccggagctcggtgtcgcaattcgaccaaaacgtgtaatatggagcaatgcaataacgatcgtccctgtgtgatcagcagcgggaactttttcccgaatggagcgccgaatcagcaacataaccacaacaacaataacaataataacaacaacaacaagcaaaggcagcatcagcatcaacacccgcaccactccccgcctccgatcagcaagcacctgacgcaaaagcatgacccaaacctgcacagtccgaccaacgatcagtcgtcacttggcgaaatcgaggtgatcttggtccaacagcacaagcaggacgcgctttcggtgatcattcacccgcaggagggcatgcagcagatcaacatgtgcttgagcggttccggaaatcccggttcggtggactcgatcatgtcgtcggacttccaaaccctgtcgccgatgcacgatcgggactcgcctgttagtatcagtgcaaatacgtcgtacgccacgttgaccccgttgcaacccctgccacccatatcgaccatgtcggacaagttcgcgtattctataggaggcaatatctgtgagccatttccagggatgaacaacagttccgtcggggtgaatatcgagatcaactcgtgctacaacctggaaaaactgggcgtgatccattcgcctgtacacatcaactcggtccaggagctgtctcccacggacatccatcatcacgggttagacaagaatcacgtcctgaaggacgccaagctggaccacctttcggataaggacgtggacgtggcggacggtaaaaacgagtgtatcctggtacgtgcctctccgattccctcgaatctcagctcagtggacgatcgctttctgacgtcggcggcgaagccggatcttggccgacagaaggacgacaccgaccagttcaccagtacagtgcaatatctggatcatccgagcgattcggatgtgatccacggtggtggcgtgggaggacccggcggggccggatccagcgtcaaagatcaccaccattcgaccgtttttctcaacaagtctttcagttcaaaagcaaacataagcgaccttaatctgtgtaaagaaattgttatagatgatgtttacgaagagtccgacttggaccacgtcaagctggaggagaagaagctagaagattcgctgaccggagggcaccattcgtcgctaacgaacggaggtggcaagtgtggttcgatgggtgacgtcggctgcatgaatggggacgttgaggagatcaacaccaaggagctggcccatcggatcagttcggagctgaagcgctacagcatcccgcaggccatctttgcgcagcgagtcctctgtcgatcacagggcacgctgtccgatctgctccgaaatccgaaaccgtggtccaagctcaagtccggccgggaaaccttccggcgaatgtacaaatggatccaggagcccgagtaccagaggatgtccgccctcaggctagcagcaactcaatcggcgaaaccagtgaacgctaaaaagcacgaggaaccggaaccgcagagcgtcatgatgggacactcgaagaaaccgcggctagtgttcaccgatctgcagagaaggacgcttcaggcgatattcaaagaaactaagagaccttcaaaggagatgcaggtgacgattgcccggcagctcggtctggaaccgaccacggtgggaaacttcttcatgaacgcccggcgccgatcgatggacaagtggaaggacgaatcgatgaaagcggcccgaaacggaggcggaggaggaggaggaagcagtgggctgtcgggactcggaatgatgggcggcggcggaagtaacagtagtagcaacgataaccttatcctggagcacctgaaagacgactcgtcggacgacgcactcggcggttacgatagttcgtttgcgtccgatggcggcccgatggaacataactatcagcagcacgttctcaactaataaattaattatttaatttcaattcaatatggacgcccagtcgcgactcacacacacacacagtcacaaagcagcaaaggcaagccagtgtagcaaaatgggggaagagcggtcgaaacggtcgacggaaacggtggacggaggagaattaaataaattcacacgcgaaaaaaaaacaaataaggaaatgcaaacgctagctaaataaaaaatcacaacaatatgaggaaaacaagaaaacacatttagtaggattaatcagagtactacaagaaaaaaaaaataagaaaaaaagtaacaaaaaatcgtaggtgtgtggctattcacgaaagcttgtgagaaacagaacaaaaaagtaaataatgaaaatacaagtaactgagtaaggattagtaggttttctttgcattttaaaccaaatttaatttaatttaaattattaactgaagaagtaaaggaaaacaaaatctagtctgttctttcgaaaaacaaaataagtactaagacaaacactgtacatgtactgtaaagttgaaccctatcattaaatgatttcaaatactgaaaaaagtaa

SEQ ID NO: 1090 - DNA, 1357 bp, Aedes aegypti; identical to SEQ ID NO: 537

SEQ ID NO: 1091 - DNA, 762 bp, Aedes aegypti
cagcaaagagacctaaccagtttgtttcgattagcaaagtccctcaatgccgtcgaaatgctgcaagttggaggtcggatcggatcatcttcactttccacccaaacattccagtacctgattgtgatcgatttcgaggccacctgttggccggcagaagatgcccaaaaatggaagaaaaatgaaatcatcgaatttccggcagtgctactgaacctgtccaacggacaaatcgagtctgaattccgccagttcgtgatgcccatcgaaaatccgcggttgagcgatttctgcatccagctgacgggcattcgccaagaccaggtcgaaaacggcgttcctctgcacacatgcttgtccttgttcgacagatggctcaagaagaatgtcctcggcgaccgggggctgattctaccgaagatggcccccagcaatcctaccggaaccgttgctttcgccacgtggaccgattgggatttgggatcatgcttgaccaaagagtgcacgaggaagaagatcaacaaggcgggctacttcgatcagtggatcgatgttcgcgccatctataagacattttaccagcacaacccaaagagttttgcggacgctttaaccacgcttggaatgcgattcgaagggcgtcctcacagtggaatggacgactcgaagaacattgcgcgggtggttgccaaaatgcgtcgcgaaggtgccaactttattatcaccaaagatttaaggccatttgagctgctcaataaatag

SEQ ID NO: 1092 - DNA, 489 bp, Aedes aegypti
atgaccgaaaacggaccagtcgaacctgcggccactaccaaagatgtgaaaaacatcgaaacgcaattgaggatcgtaaacgagacttgcagcagcaagattgatgcgagagaagctaaaataccgaaacggacacagcacgaacaaggacatctacaagctctatcaaatcggaaccagcgctacgatatacatgaaactatgtccggcttggagtcatatgtgaacacaaccgtttccatcataacagccgatggtcgaaatttcgttggcactctcaaaggattcgaccaaaccatcaacatcattctggacgaatcacatgagcgggtatactcaatgaatgccggcatagagcaagtagtgctgggcctacacatcatccgcggggacaatgttgctgtaatcggccaactggacgagagcatagacagcaaattggacttttctacaatacgcggattgccactagaaccagtggttcactga

SEQ ID NO: 1093 - DNA, 1352 bp, Aedes aegypti
atcgatagtgtttcgaagtgtgtttagtattttcactgaaattgcaaacgtttattgataattttgttgaaaaaagtgaaaaatgggctcaaagcgcaagaatatggaggacgaaatgtcccgctttgaggcggaaatttcaaaggcaaccggtccctccagcggaattagctccaacccgttcatcccatcccaagtgcgcaccgttatcggttcccagacgtacaatcaggtgcagcaaaagttagccaccgtgccaacccgtattccacccccaccggttcctccgtttttgccaacctattcgacgcctgttccgcagcaacactcttcccagcagcattctgccgttccggaaaaatcgtacaacacagaacctacgccggcggtcgtcagcagtgccccaaaactatacaacgccaggccaacggttggcaccctgcccaaagtggatgcgcccgcggctgccagcagttccatagggccgaccatatcgtcgactccggtgcaatcgtacgatatcgcaaatatacagtttgaagtgacgactaaaattaaaaagcagaaaacggaaaaatccggcccgaatcctattgccgaagaagccatcaaggcagcgcgtgcttcatccgctctgcagtcgtttggcaattctgaccgccggggtaaaaaggaccgaaagacggtgcgcgtagccggtggccaaacgtgggaggatcaatcccttggggactggcccgatgacgatttccgaattttctgcggcgatttgggcaacgacgtgaatgatgaattgttgacgcgcaccttcaacaagttcccttcgttccagcgcgccaaagtgatacgagataagcgaacgagcaaaagcaaaggctatggttttgtgagctttaaagacccgcaggatttcattcgggctatgaaggagatggacggtcgctacgttggcagccgtcccatcaagctacgtaagagcacttggaaaaatcggagtatcgaagcggtccggaagaaggataaagaaaaacaagcacttcttagcctgttcaatcaaagttaggcttgttcggcgattgaagtggctcgagtttgtgtgaatcagtggtaagtgtcctaatttcatacacaatctaggtatacaaattgatagttttacaaattgtcttgcttttatttccacattgattattcctctacatttacttactattttgtcataatttatccattatctgttccatagagccttcagatactccaatatatgtattgcgttctcaattaactttaagtcaagacaaatcgttatgatatgaagttagaataaatcttgactctttcatttgagt

SEQ ID NO: 1094 - DNA, 831 bp, Aedes aegypti
atgaactcatttaataaacttaaaccccttgccagtagtgtcggtttgatttcccgtaattatgcattcaaatcggacttgaaaattaagtgggttcggccggagaaaattccatgctacaagccgcaaaagagtggcgatatgctgccaatgcgaccgattgccggttcggaactgctgaaggatttccggatgtccaaggagctggaaagtgcggatgacacagttaaggcaatgttctccctggatcataaccgcagacgggaaatgctggaaaactttaaggaggaaatggtgaaacgagttcagcggcatgaactggattacggctcgattgaagccaagttgggtctgatgactgcgcaaattagaagcctccaggaagtgatggaaaaattccctcgacaatcggctgctaaggtccatctgaaggaactaatcgataagaggaagcgttttctgagatatttgagacgttgggactacaggagatttgagtacatacttgaaaaattagacctggtgtacaagccgtatcctacgcactttcattggattacccgaaaggattctcttcgtaagctgaccgacattcactgcgacgatataaagaacactcgtctgcaaaactatcgccagctgctggaatctcaacagttggacttcctcgcgaagaagctagaaaacttggaattcattcggaaggagcagatcgagtgcaaagttcccgtcacggtcagtgtggaacaaattcaggcggtgaaaaagcaatacggagagctgaaggaaaagcgaaaactgatggaagaaaaaacgcaagaggaagaatga

SEQ ID NO: 1095 - DNA, 435 bp, Aedes aegypti
cagtcaacaaaaatcctcactgagaagaaaagcacccttattttacgctggaaaaaaacgaatcgcagcccaaaatcaatcaaaatggtattcgccaaatcgtgggaagatttcgagatcgccgccgagaacatgtacatcgcgaacccgtgccagtgccggtttacgatgaagtacacccaccagaagacggccgtcgtcctgaagctgaccgacaacgtcaagtgcgtgcagttcaaaaccgaggtgctgtcggacctgaagagaatagagaaattcaccggcaacctgatgtggctgatggcgtccaaggagtgaaacggggtgttatgttctttaatttttaatatgctaagtgtggatttttcttgttgggtgcatgtgaggaatgtaacagtggattttatgtgagaaatacatattccgtacatgtac

SEQ ID NO: 1096 - DNA, 1212 bp, Aedes aegypti
atgttcgttcctagtgaagatcccgtaaaaagtgaatttctctcggaagaagaagatgatgaaccggaagccgcacccaaaagaaaacgtatgaaacgtggcagcaagaagtcaacccagaaagcaatacaatacaactgcgatcaatgtccggaggttttccaggaccaactgttgatggttgcgcacaggcgaggccacgccggtttaacgccattctattgcgaaacttgcgagagggagttccccactctcttggaaacgaaactgcattacgccgagcagcatacgcagcagaagacttgggactgcgatcaccctgactgtacggagcaatttgccagtcatcaagctttgaggcagcacaagatcaaggtccacgatccgaactacaccaaaccgcagcccagggtcagtatatgcgaagcgtgtggcgattcgttcgataacagtcagaaactccgacggcacagatatgccgttcacgaaacggaggaaaagccttacatgtgtgagatttgcttcctgaggttctctctgccacacaagctcaaaaagcacatgctgcgccacgaaaacattcggagccacgtgtgtccgtactgcggagtggcaaaggtgaccaaaggcgagttggtgtcgcatataaagaatgtccattcgaaggagcggggattgagtgaccaagtggcctgtgacggacagcacgcggatattgccgccgccaccagtgccgaagaaattacgttccttaaagagaaacctaagaaggatactgatcgaattcgtaacgtgaggaagatcaaccggaacaacggcaaagcgtacgtccggaaggataacgttctggtggagggtaagtcctttcaggagcggttcgactgcgggtgtcccaaaaactgcaagggtaacttcgcgtccgaggctattctggagcagtttttcggctcgttttggaaccttggcgattggcacaagcagaatgccctcgtggcggatcaggtcaagggggtggacgtgaatcggcaccggccgcggtccgaacttaatccgcgctcggagcggaccctgcagttccagtattttattccgagcgagcaggataacgtgcgggtttgccagaagtactttttgggtatactgcagattagcgccggacggctgtacaaatgtttgggtaggaaaagtccgaataaaaaacggaagtgaagt

SEQ ID NO: 1097 - DNA, 605 bp, Aedes aegypti
ttttgtttaatggtgtgtttgacgtttctctgcattcgagacaaaaaaaaacgcgaacaacgcgaccggaatcgttttgagtgctgttgatattcattgcattttaatttaaaactggatttgtacgtaaaatcaatattataatgctgttctattcatttttcaaatcgctggttgggaaggatgtggttgtcgagctgaaaaatgacctcagcatttgtggcactctccattccgtggatcaatatctcaatatcaaattgaccgatatcagtgttaccgatccggagaaatatccccacatgttatccgtgaagaattgtttcatccggggatcagttgtccggtatgtgcaacttccgggcgatgaagttgatactcagctgttgcaggacgccgcccggaaagaagccgttacgagtgttcggtaaaataagttagccattgggagtgcataatatatcatcgaaaaatataaaatgaagttcattcgtacttgcgcttcgggctggtagacgagtcacttttttgtgtctgatgtgaatgacggatgatgttataaaatcaacacatcgcttctacaatggacctttgcacgagttcac

SEQ ID NO: 1098 - DNA, 5964 bp, Aedes aegypti
atggctgagttttcacaatcaatgttcctgggagaaaataccctggaccgaatagaaaagcaagccacaaacaaacagcgcaacaaaccggaacagctttcgacaccgcctccatcaacttccggagcggccaacaggcgaacgacccgttccagtcaggccgtcaaacgccacagtagcgatgagcaaggactagaagtgattgaagaatcgcccaccaataacgcgactcggttcggtggcggtggaggggacgttactcgccagaaaagtgtccgcgagcgcttgaaaaccatcggaacacagtcacggtcgtcgcgatcccggaaggctttccgccggaacaagtccgattcggtcgtgtcgaaggtgggggtggctgggcttcagtgttcgaaggcaagaagtgaaagtagggaccatctggatatgatcgattcggaactgttgaagagcgatgtgtgcttcaatgggttgtccggggttcccgtggagcaagtggaagcgaagggagcacagaagacggaaataaacatctcgaaactgttggagtcggatttaagctttgaagtgccgaaactgatcggacaacataatggccagcgaagccccccggatgccaaagtatcaagaagaagcgatgagtttgaggacatgttcggaaatacagatttttccgtggatttacatccacgtagtcagagtttggtaaactcctatcgagactcaaagccctacgataacatgttcgagcagagtgcttttaccttagaagttccggaggaaccgaaagcagcagaaccgcaaatgacgagccacttccgagaagctgctgaagatgaagagttgagagagttctcagagttgcaagaatcgcttcgcgttgatccgaacgattcggatctccagatttcttcggaacgtttggaaatccctttgtccatcgagaatgttacgtttgcacatttaccttcggtagaaggtttggaattggtacaacaagaaatggacaaatttgtatccaacagaattgagcagtccagatcatcaatggttcaagtcccaacaaagcctcaatccggaagtctcagcaaaacgctttccatgacgcaaagtcacacttttccgtcgcagatacctttcaaaccaagcactgcaaacactcgacccgagccaccatccaacggttcaatgtccctggactcgtcgaaaaatcttcgcctggtgtcgaactggggtctgccggatcccatagcgaaagcttacgccagaaaaggcatcaccgagctgttccagtggcaagcggactgtctttcgaacgccaaagtgatactcgagtgtgccaacctggtctacagtgctcccacttccggtggaaaaactttggttagtgaattcctggtcgccaaggccgtggtcgagaggaagcggaaggcgatcgtgattctgccgtttgtggcggtggcccgggagaagatgttttacttgcaggaaatcctctccccggctggtatccgcgtggaaggcttcttcggtggacacaatcctccgggcggcttcgacagtgtcgacgtggccgtgtgtacgatcgagaaggccaattcgatcgtcaatcgcttactggagcaacgaaagctgggagacgttggactgctcgtggtggatgaaatacatctgatatcggattcgtcgcggggatatattctggaactgttgctgacaaagattcgtttcgcgagtgaaaggctgggcgagcggattcaagtggtggggatgtcggccacgttgcccaacatggaactgctggtggagtggttaggtgcggaacagtttaggaccgactatcgtccaattgaactgaaggagatggtcaagttgggaacttgtgtgtttgataatcagaagaagctgttgaggaagttggatccggatccgtttcaggaaattatgcgggatcaggataacgtggctcagctttgcttggagaccattctggagggttgttcagtgattgtgttctgtccgtccaaggatcggtgcgaacagttggcacttcatctggccgagttcatctatcgaacgttgaaaagtgggggaaacctgggtgaacgtttgcgtcaggagataaaccgggataaattggaggaggcgttagggttgttgaagaactgtccaaccggtttggatgctgtgttggggaaaactgctcgttatggatgtgtgtatcatcatgcaggtcttacggctgacgaaagggacatcattgaaagttctttcaaaagtggaaacctaaggattattgtggcaaccagcacattgagcagtggagtcaatttaccggctaggcgggttataatccggactcctatgttcggtggaagtgtaatgaattcgttgacctatcggcagatgattggaagagctggccgaaagggtcgtgatattctcggagaatcgatcctgatgtgcgacggacaaagttctaaagcagcttgggaattggtaaaaacggaactaaaacccattgcttcctgtctggacggagatggctacagccacctgaaacgcgccatcctggagatcatcgcttccggagtggcgtccagcaccgcagatctggaaagcttcgtcaactgtacgctgttcagttgtgagaaaaagtgccgcttctcgtttaccatagattcactagaacaaaaccatcggcatgtggcgtggtcaaagaaacgcgagtcagacaccaatcatggggagggggagagcatcgatcccatagcgagctgtgtccgtttcctgctagaatacgaattcatccgaatgcaaaccaatgtggaaagtggcgaaacgttgctggtttctaccccgcttggtaatgcatgcctgtcggcttcgatggcacctcgagatgggttcctgttgttcagcgagttgcaaaaatcccgacagtgtttcgtactggaatccgaactgcacgccatttatctggtgacaccatactccgtaagctaccagtggcagaacatcagctgggtagattttctcgagcgttgggagaacatggacgcggcaatgagacgggttggtgagctgataggcattcgagatgcctttttggtgaagggtttgcgcggtaagatcggtgaggctgaccacgaaagtctcatgacgcacaaacgtttctacacggctttggcgttgaagcggcttgtcgacgaggaaccgctgagtgtggtggcccagcaattccagtgctctcggggattactacagagtctacagcaggttgcgtccacatttgctggtatcgtcactgcgttctgcacatcgctcaactggaatttgctggctatgatcatcacacagttcagagaacgcctcttcttcggagtacagccggatcttctcgacctgatgcggatagctagtttgaatggacaacgagcccggttgctattcaatgccggcgtcactgggctcttggagttggccaacagcgatccccttaagatagaacaaatcttgtacaattgtatgagcttcgaaacggaacaacagcgcaaaggcgaggaagaatttgaaacacgacggagactaaatcagcgcaatttgtacgtgacggggagagctgggttgactgttcaagaagcggcacatttgttggtcacggaagctcgacaatatatacagttggagatgggtgtgcgtaatccggattgggaggaaaactctgggagcaaggaagcaaatgaatcgcttccaatggaaaaggttgacagcgaaaacctattctcacctgtacaagctgttgttcaaatagaaacgaaagaaacgtccgcgtctgaacgacgccagcaattgccctcggtagtttctttcgaagtatcggatctggacagcaatagggaaatagagcagctccacaattcacttataatgaacttttcgcacgtgttgagtgatgataaagtgccatctcaacagctaggtggcggtaaatacgatagtttgaacgttgtagacctttgcgtagattcaagtttattcgagaaatttgcagctattttagatcaatccgattctgttagtgtttcttttgctattagtcagtttgatcgttccaagtcagttattggtggtaatttgctgatcaaccaacaagtgaaaacaaatcaagatgaaattgtgcgaaactatccttttctgttcgataacttttatctcagcggagctgcgtttacatttccggaagccggtggagatgattccgaaaatgtagtttattatgtaaatcttcgtaaaagcggtgcagtaaaatgtgatcaaaagaaatcgatgctaggtagattgttggagcgagaaaacgtcaccgttgacatgtacgatgccaaagaacagctgaaggtgatttaccggagtggattgttgtcgctggagcaagaagtgattgctagtctgcgcgatccgaaggtcgcctgttggttgttacaagccgaggagaaggttattccactacaagctatggtccagcaatactgtccggagcttaccacactgtgccaaatggcgggccgttgtccagggtctactggacctagctcaaattacatgagcactatcgatgcaaaaatcagatgcaccgtagagagcttcctcgtgacacacctgatccgcgcccaaataactcagttcgatcagctagatcgaacgcaggagatgctgcccacttttgtgcagcgagaaatgcccatccatggggcactggctcgcatggaactggtgggattcccagccgatgccaacaaattagctcacctaatcgaacggctcaaggtggcccaggagcggatcagtgaacgggttcgaacgttgaacggaggccgccggttgaactttgcgtccaccagtgaggtggccgctgctctgaaagtgccccgcgaacggaacggtagggtgaaaacctgccgacaggtgctggaaaagattgattccccgctggcaacgttggtcattgcgtataggaaaatcgagagcaaccttagtcggacgatcgaaccactgtacagggcaattagggatgggaaacggatctatggtaacagttactgcttcacttctactgggagaatttccatgcatgagcccaatttgcaaaccgtcgtgaaggatttcaaggttgaaatcgaccccggtcatgtcgaggtgttcagctgccgaagtacattcgcctgctctagtccagatcggattcttctatcggcggatttctgccagttggagctgtgcgttctaactcatttgtctcaggaccggaagctcctggcggtgatgaatggcgggaaggacgtctttcgcggaatcgccgccaaatggaatcgaatagaggatgaggccctggtgtcggatgagctgcggaattacaccaaagctatcgtgtatggagtgatctacggaatgggcgccaaatcgatggcggcagaattgaacgtagatgaagacatggcctgcacgctgatggagcagtttcactcgacctatccggaaattcgccggtatgcagataaggtgattcaggtgacaagagaacgaggctatatagaaacgctcaccggtagaaggcgctatcttccggcgattcacagcactgatatgaagaaacggtccgaagcggaacgccaagctgtttgcactacggttcagggttcggcagcggacattctaaagaacgctatcctgagaatgatgcgcaatttgagaaagtaccgtcagacgcttcggcttggacaggttgaactggtgctacatatgcacgatgaactgattttcgaagtgccacgcgatcagtcccgcaaggtggcgaaaattctcaaatctagtatggaaaactgcgcgaagctcagtttgccgctgagggtaaaggtaaaaatgggggccagttggggagaaatgcaggaaactcaagtgtga

SEQ ID NO: 1099 - DNA, 807 bp, Aedes aegypti
atgaacattctggggagaatagttcgcacgacgatctactgtagagcaccgctggcagcttccggccatcgatcgattattccaatagcggtaagcagcagcaccaactatcaaattcaatatgcttccaaatcaaccaaagctggtgctggagattcggcaaccgctgagggaaatgctccggccgggacgaagaagcccaaaacggcaccgaaaattaccctcgttggacccgatcacagtgtttcgatcatgaacctggacgaggcgcagaaaatatccaaacggcgcgacctgaagctggtcaaggttgtggacttggatttgaaaactcagcgaccggtgtacaagctcatgaccagtgcggaatacctcgaggaagatttgaaacgccgtgaggaaaagaaacgcaacaagcaggaagcggccatcaaaggggacaagctgctgaccgtcagcgcacggattacggagcacgatctgctgtccaagattcacaacgtgcagaagtggctcaacaagcagtacgaggtgcgggtcatcgtgtctggcgatggggacaaagccaaacaggaatcggtggctagcgcgttcgaaaatcacgtcaaagatctgggcagaattgttcagaagcgcttcagggacaacgatatgcgctttcagattctgcctatcctcaattcttcgaatcaggaaactccccacactgccacgttgaaaaaacccgctcaaaccgggaagaatcccggccccgagcaccaatccgttagggcatttcattcggcatctttcgtgtcggcggcgtga

SEQ ID NO: 1100 - DNA, 5444 bp, Aedes aegypti
atggaggacggccatagcaagtccgtcgaagaagtgatcagtcacttccgagtggatccagaacggggtctctctctcgaccaggtcaaggaataccagaagaagtatggacctaatgaactcccagctgaagagggaaaaacaatctggcaattagttctggaacagttcgatgatctgttagttaagattctgctgctggctgctatcatttcctttgtcctcgccctttttgaagaacatgaaggtgttgaagccttcgtggaacccctggtcattttgctcattctgatcgccaacgcttgcgtcggtgtgtggcaggaacgtaatgccgaatccgccatcgaagccctgaaggagtacgagcccgagatgggcaaggtcgtccgtggcgacaagtccggcgtccagaaggtgcgcgccaaggagatcgtgcccggtgacatcgttgaggtgtccgtcggtgacaagatccccgccgatatccgtctgatcaagatctactccaccaccatccgtatcgatcagtccatcctgaccggtgagtccgtgtccgtcatcaagcacaccgatgctatcccggatccccgtgccgtcaaccaggacaagaagaacatcctgttctccggtaccaacgttgccgccggtaaggcccgtggtgttgtcatcggaaccggtctgaacaccgccatcggtaagatccgtaccgagatgtcggaaaccgaggaaatcaagacccccctgcagcagaagctcgatgagttcggtgagcagctgtccaaggttatctctctgatctgtattgccgtctgggccatcaacattggtcacttcaacgatccagctcacggtggctcgtggatcaagggtgccgtctactatttcaagatcgccgtcgctctggctgttgctgccatccctgaaggtctgccagctgtcatcaccacctgtttggctctgggtacccgccgtatggccaagaagaacgccattgtccgctcgctgccatccgtcgaaaccctgggttgtacctcggttatctgctctgataagaccggtacactgaccaccaaccagatgtccgtctcgcgtatgttcgtctttgaaaaggttgaaggcaacgacagcagcttcactgaattcgaaatctccggatccacctacgaaccaattggtgaaatgaccctgaagggccagagagttaaggcctccgactacgaagttctgcaggaagtgggaaccatctgcattatgtgcaatgactctgctattgatttcaacgaagttaagaaggtctttgaaaaggtcggtgaagctactgaaaccgctctgatcgtccttgctgagaagatgaatccattcaacgttaccaagcaaggtttggatcgtcgctcggctgctatctgcgtccgtcaggaaatcgaaaccaagtggaagaaagaattcaccctggaattctctcgcgatcgtaaatccatgtccagctactgtactccactcaaggcctccaagcttggaaccggaccaaaactgttctgtaagggtgctcctgaaggtgtcctggatcgttgtactcatgcccgtgtcggatctaccaaggtgccactgactcagactctgaagaaccgcatcttggatctgactcgccagtatggtaccggtcgcgataccctccgttgcttggccctggctaccgctgataacccaatgaagcctgatgatatggatctgaacgattcgaccaagttctacacttatgaagtcaacctaaccttcgtcggtgttgttggtatgcttgatcccccacgtaaggaagtcttggactcgatcgctcgttgccgtgctgctggtattcgcgttattgtcatcactggtgacaacaaggctactgctgaagctatctgccgtcgtattggcgtgttcactgaggatgaagacaccaccggcaagtcttactccggacgtgaattcgatgatctgccagtcagcgaacagcgtgaggcctgcgcccgtgctcgtctgttctcccgtgtcgaacccgcccacaagtccaagatcgttgaatacctgcaaagcatgaacgaaatctccgctatgactggtgacggtgtcaacgacgcccctgctctgaagaaggccgaaatcggtattgctatgggttctggtaccgctgtcgccaagtccgcctccgagatggtgttggctgacgataacttctcctccattgtcgccgccgtcgaggaaggtcgtgccatctacaacaacatgaagcagttcatccgttatctgatttcttccaacatcggtgaggtcgtgtccatctttttgaccgctgcccttggtctgccagaagctctgatcccagtccagctgctgtgggtaaacttggttactgacggtctgccagctactgctcttggcttcaacccaccagatctcgatatcatggagaaaccaccacgtaaggctgatgaaggtctgatctccggctggctgttcttccgttacatggctattggtggttatgtcggtgccgctaccgtcggtggtgctgcctggtggttcatgttttctgaccacggcccacagctgacctactggcagctgactcaccatctgtcctgcattgctggtggagaagaattcaagggaatcgactgcaagatcttcactgacccacatccaatgaccatggctctgtctgttctggttaccattgagatgttgaacgccatgaacagcttgtctgagaaccagtctctggtcactatgccaccatggtcgaacttgtggctcattggatccatgtgcctgtcgttcgctctacacttcgtcattctgcacgtcgatgttctttccaccgtgttccaggtcaccccactgaacggagacgaatggatcactgtgatgaagttctcgctgccagttgtgctgctagatgaaatcctgaagttcgtcgccagaaggatctccgacgtcaaccccgagttccattaaatcaccactccagaaagcttaacaagcttcctatcgtttcatccagttcaactgttcatcacaccaaatattccctccagaactaagaaaatctacagccaccttgaaccccacgcgcaaattacaacgtctatgatgcatgcttcaaccaaagtaaaacatcctattttccccgtacctatgctaccatctatttctgtgtcgcgtgcatctcgtgctgcactggtgttcggagaacaggatacatcgagtgcaaaggaaggactaggaaccggccgtcgaagcgcggggttttaaggcagacatccttggctatcgcgagttctcgaccaatggtttctgtttccgtctaacaaacaactatacacagggaaacagatccttaagccaagatctaaccagactcggatatagccagaccctttccttttatttgtgttatctcatgcttcatcgacctcgttctgtgtttgtgctgttgttgttcctttaccaacaatgaagaacctgatgaatactatacaacaaccctacgccatccttactgctaacctttaacgtcaatcaaccccacaaactgtttgccatcgtacagcgacgaattagaattatattaaaatgttttttaatgagtgatataattctaagcagataaacgacaaactaaggaaacaagtaaagttatttattttaaattattctatagataatttatcccccaaacacacagacgaacttatctcataccccccatattgaacgcttatccgacgtttgtttcactatcaaatcccatttccttaatttcaaatctcgaataatatttcaaaacgcttcaattcatcatactgttgcaagccacgccctctcgttctgaaaaccgatcggacgaaacgactgtaacggacttaccttggcttgcaacgatccaaaagcttccattaaaatttttccatgcttttttttttgtctttcgaaacccttttaccaacgaccaattttgattgctactgtttgttatgtttaagtgactgagacggtttggcgcgttacgccccaaactattcgacagccgttaatctgcgcacaataaacttaattgtcttttctcttttttccattctataccctgtaggcgaaattaaaaaatgggactaagaagctctagtggcttttaacatctgctagtactcgacaaaatcgtgtttctttcagcaaacaagaaaccaacgcaaaaatgcaataataaatgaataaaaaaaagtcgaaacaataaaaaaaacaaaaaccaacaccaaatcgttatttattaaatctaggaaggaaacctacatctgtttctcctactaggaagtattaaaaccgaatatcaaaaatcaaatgttaaatatcaaatgtctggttttcaacaactaatccaaaggataaaatgagttgaatttcctttttttctcgttttacttaaggctaaattcgaattatctacaccaaagtgaaaaaaatactacaatacatttagtgagcgtgttccaatcaaaagtatcgaaaaagttttgccgaagttttcttaacatttcaccgtagatcagaaccagaccatttgaagttaatatccctggggtagagtagaacaacagcgacttttacttttttctagtgaaaatgaacaattgaagacatttttctctcatttattaatgcttaagtttcatttcctcgaattgtatctttatatactgtcttttcagttgatcttttgttgaacccttttcaaatatttatgttaccttatgtccttttagtttatttattatttttataaaatacgagacaatgtaaataagataattaaataaagtgaacaaaggttgaaaagagagacatcatcttcttgttgagttgtagtcgtcgaaattacacttaaaaagttagatatttacaaaaggaataaacttaatttaataaaagtaaaaaaaaaacattgtgtgacgttgaccgccatctttaattttatgtcatttcatctttgtttaaataaacaagtataaaacaagttaaagtttcacgaaaatgaacaataaaaatcgttaaaaccatctgcctatatctttatctcgtcgaagcttcttcagtcgtcccagtttatctgtttgataagatttgttttcccgctttttggtacctgaattggttcaaacaactattcgagattcagtttgcaagacagatctccaacaacgcgtgttaggatagaaggataccgtccagccagtgatcgtggattgggaacgtttgtcactcgtactacattgtgtagtgttgtgatgaacaggaaaactgaaggatcgacacaaacggcactcgtggctaaatagagatgtttagtttgataaacttgtttttgaataaacattgattgaataaagaaacagtcggagataattatg

SEQ ID NO: 1101 - DNA, 3522 bp, Aedes aegypti
atggaaaaatggggtgataacttcggggaagaactgtgggacctggctcaaaccatgacgaaggctagcgaaatcacgcagaaatacaaagcatacaatgcccgggtggagcacaaggacggcaccagtctgatcaaatctatcgtggataatgtcggccggatgttgatccgcaagatggacgccatcaagtgcatcatcaacatggccgagcagttgtccgaggagttcgagttcaacgaaaccatcgcgggcaacttcacgtactattcgagcaagtattcgaatatcgatggtcgacctgagcccaacataccgtcgtcgttggaggagaacatctggatgtaccggaatatgtatttgaatccagatacgcacttcttcaacatctcggtgaacacgtcgtacagctcggtgcacgtgccccagaacgtgtacgaccggtacccgtgggtgatggaagctctccaatggtccgaagcgttggacgacgtgttcatgcagaactacaactcggatccggcgctgtcgtggcagtattttggttcctacacgggtattctgaggcattatccggcgttggagtgggaccgacggcaggtggatacattcgactgtagaaagcggtcgtggtacattgaaacggccacctgctcgaaagacattgtgattttgctcgataattccggttcgatgaccggctatcgtaactacatagctcaattaactgttaaaagtatactagatacgttttccaataacgattttatcaacatctataagtactcgaacgacgtagatcctttagtggattgtttcgcggatatgctgattcaagcaactccggagaacattcgatttatgaatgaaaaggttcgaggacttgaaccagatggctatgccaatgtcaagaaagccttcgtgaaggcttttgagctgttacaacattaccgtgagatgcgaaggtgcaacgagacggttagtggttgcaaccaggccatcatgttgatcactgatggagtgcccagtaacataaccgacgtgttcgagcagtacaattggttcgaaaatggaaccaaaattccggtgcgagtgttcacttaccttcttggacgggaagtgaccaaagtgcgggaaatccaatggatggcttgtttgaatcgaggccattactcacacatccaatcgttggatgaagtacaggaagaggtgctgaagtacgtaactgtgatagcaacgcctttggttctgcaaggcgttgaacatcctccgacatggacccatgcgttcacggatacagcggaaaatcttcagtcggatgcagacgacgatgaaccacctcggttgatgattgcagtcggtgcaccagcattcgatcggaaagcgaatcattataatgaaactcggacggcacgactgcttggagtagcgggaacggatattcctctcgaagatctggatgatcagacgctgccttacaagcttggagtaaacggatactctttcatcgtgagtaacaacggatacgtggtaatgcatccagatcttcgacctgtttacaaaggtcgtctcaaggagaactacaacagtatagatttaacagaaatcgagcaagtactgaacgatatcatggaagcctcggacgaaactttgacgggacgtgaagtgaatccgcaaatggaagctctcagagaaaacttggtcttttcgaaatcgggcaagatgttgaaggttccggttcggtttcattacgataaaatgcggcgagtgtcgctggaatatcaggactattactacgaacccttggagaacactccattctcgttgggtttagtgctgccccatgattacggcaatacatggattaaggttggagatgagatcaaacgaaaccagcatatgggactgaacatatccgactttttcgttggagagaattggaaacttcatccggattggatctactgcaaataccactacctggagggccacgagttcaaaaccccggaggatgagctgcgccactttttggtgcggctttacgaaccgaactggaaatggttccagcagtatgagtccgagccggacgatatcgaaaaagatggtgacgaaccgaactgtggtagaaaaacgctggacgatgatgcttactattgcaataaggagctagttcagctgttggtatttgacgcgaaggtgacaaacaccagctaccggaattgggagtttgagaatgaaaatgagcgaagaatcattgatatgtacaacgccacgctacgcttcgttgcaactatgagtggccttacgaggtggcagtttatttttggggaggttgaagtagattctgacaacgagttcggtgactatcacaaaaaagccatcgacgagacttggtacagaagcgccatcttgcagcacaaaattgatccgaaaagtttcgtgtattcggtggctcacgcttcggacgaaccggaagacgaagaactgaaagttaccgcgtcgatgggcatctttcctagagatggaggttttgaaacaccaggctgtgtaacgggattccaattttcgcatcagctgatgtacgagcgcttcatggaaattacgtcgagaacaacatgtgatggctgcatagaaacttgcaattcggaaagccgtgattgttacgtaatcgaccacaacgggtatgtggttttgtcggagacctacaacgatacgggtcgatttttcggcgaaattcaaggcgcaattatgcaatcgatggtggacaaggaaatcttctccatgataacggtatttgacctgcaagggctgtgcgaccatgaacgagtagctcagaacgatggtttctcgttgatgcatcccttacgagcactgatgctgggaataaactggctgatagcggagttcttcataactttatcgaagtttgacttctgggtgcatggcattcctagtcctgaatacgattatgacaccggagttgagtacgaagacaccgactatggtgacatgtcacgacccaagccgaagaagcctctggtagatgaagaagaggagtattttaaccgtcccaaggaaatcaaaatggaaactgtgtacgaagcgtgcgacaaaaagtccaacctgtacgttatgcagcaggacaagttcatcaagggtgacggattcttctacgaatcagaaccggtcaatcctatggaactgttgcaccgaccgtactttgccaaacgggttccacgttcgaatttactgatggtcatcgtcgaaagtgagtatccatcggaccatgtgattctgtcggcggctccccaaaacgtcatgcacaatgggagtcaggcgcttccgtgcgtgaaaacaaggctaaactttttaccccgccgacggctggaggaatgctacaccgagcatcctgacgaggacatagtggctcagtgtggcgaagcctccatgccaacaattcaactgactgtagtgatatcgtccctagtatcacttttgttatatcgatgtgcccaaatgtag

SEQ ID NO: 1102 - DNA, 1790 bp, Aedes aegypti
cggacaaccgcatgtgcgcatcatctgacatctcccgccgcaggtaacgcctccgtcccaacacccggtcgggcaccctgcgcatcgcagttacataagacaagtggagaaaattttcctagccctccgcacagtcgccgaaatgttgtcctcgctgagaaatgtgctaagtaccggttcccgggtccaggccgacctcgtccggaactatgcggccaaggcagcagccaaggccgccgctggagcccaaggtaaggtcgttgccgtcatcggtgccgtcgtcgacgtgcagttcgatgataacctaccaccgattctgaacgccctggaagtccaggagcgtggctcccgtctggtgctggaagtggcccagcatctgggagagaacaccgtccgtacgattgccatggacggtaccgaaggtttggtgcgtggacagcgcgtcttggataccggatctcccatccgtattccggtcggtgctgaaaccctgggccgtatcatcaacgtcatcggtgaacccatcgatgaacgtggccccattgaaaccaacctgtccgccccaatccacgccgaagcccccgagttcatcgacatgagcgtcgagcaggaaattctggtcaccggaattaaggtcgtcgatctgctggccccgtacgccaagggtggtaagatcggtctgttcggtggtgccggagtcggtaagactgtgttgattatggaactgattaacaacgtcgccaaggcccatggtggttactctgtgttcgccggagtcggagaacgtacccgtgaaggaaacgatctgtacaatgaaatgattgaaggtggtgtcatttccctgaaggacaagacctccaaggtcgctctggtgtacggacagatgaacgagccccccggcgcccgtgcccgtgtcgctctgactggattgaccgttgccgagtacttccgtgatcaggaaggacaggatgtgctgctcttcattgacaacattttccgtttcacccaagctggttctgaggtatctgccctgctgggtcgtatcccatctgctgtcggttaccaaccaaccctggccactgacatgggtagcatgcaggaacgtattaccactaccaagaagggatccatcacctccgtgcaggctatctatgtgccagctgacgatttgaccgatcctgccccagccactactttcgctcacttggacgccaccactgtattgtcccgtgccatcgctgagttgggtatctacccggctgtggatcctctggattccacctctcgtatcatggacccgaacatcattggtgccgagcactacaacatcgctcgtggtgtccagaagatcctccaggattacaagtcgctgcaggatatcattgctatcctgggtatggatgaattgtctgaggaggacaagctgaccgtggcccgtgcccgtaagattcagcgtttcctgtcgcagccattccaggtcgctgaggtgttcaccggtcacgccggaaagctggtccctctggaggaaaccatcaagggcttcaccaagatcctgaacggcgagctggaccatttgcccgaggtcgctttctacatggttggtccgatcgaggaagtcgtcgagaaggccgaacgtttggcgaaggaagccgcctaaggggctttcgaaattgtgctggaagaaagttattacccattacataataaaaaatcgaagtaaatttaccataagcgaaacatgtaacaaacaaagaaaaagttaaataaaaatcggaaaatattacataatc

SEQ ID NO: 1103 - DNA, 2444 bp, Aedes aegypti
gcacggtagacgcgaacggaacggaatcggtattcaatcgagcagagaattcgctgcagtaaattaccgcaatcgagcacggttcattgggttggctacgggcacaacattatcagcttatcggacgcttgtcggggatgtgagttgagcagtttgcagaatgcctcaataaggctgattgtttgtgaatttcatgttggatgaattgcgctacagttgactggaaagttccgaaactcttggaagagacgtgacgatcggtgaagtgctgctagttagataagtgagatgagcaagaagagctataccgtaccggtggcggacgttgaatcgccggatcatcgagatgaccagaaactgctggggaatccgtttgacaagctgccgccgatcatcatcggtggaccggaggggaatggctaccatgcgtttcagcagaagggaagcccggtgacgcccacaactccgatcgtgtacgcccctcgatcgccgtcgctcggaaagagaagtcgagcattccggccgggcacaactcgcaagtaccgcaagcgggccatcctgaagagcggcgagtgtaacatttccacttccaaggtttcgcagcaacacttgcgcttcctgcaggacatcttcacaacccttgtggacgcccaatggcgctggacgctgctcgtgttcgccttcagcttcatcggctcgtggctgttcttcgccgtgatctggtggctgattgcgttcacccatggcgacttggaggagatgcatctgcccgaccatcaagctgaagtcgggtggactccctgcgtgtacaacatcgtgtcgttcacctcgtgctttttgttctcgatcgaaacgcagcacacgatcggctatggtgttcgtacgactacggaggaatgtcccgaggcgatcttcatcatgtgcttccaatcgatctacggagtgatgattcaggcatttatggtgggaatcgtgtttgcgaagatgacccgaccaaagcatcgcacccagacactgctgttctcgaagaacgcggtgatctgtcagagggacggagaactaagcttgatgttccgagttggagatatgcgcaagagtcacatcattggggcaagcattcgggcacagttgatccgaacccggacgactaaggagggcgaaatcttgtctcagtaccagacagagttggacgtaggagcggatggatgtggatcggatttgttcttcatctggccacagatcgttgttcataagatcaacgaaaactcaccgatgtataatatgtgcgcttcggacctactgcaagatagattcgaaattgtggtgattctggaaggtacggttgaatccaccggacagtccacccaagccagatcaagttatgtcaactcggagattttgtggggtcatcgctttgagcccgtggtgttctacaacaaagataaccagggctatgagatcaactacagtaagttcgacgaaacgcagcaggtggacactcctttgtgctctgctcgcgagttggccgaattctacaaaattcaggacgactacagaagcaacgccgaggattcgatccaaacgcctgcttagatgtctaaatgtgctagtgtcgtcgtcgttccctcatgcattgaccggaaaagggtgctttttcatccctcgaacttcctcattcccatctctcctccgactccttcataactcttattccattcaatcccatactccatcccatccaatcgttccaaaccaaacctaaaaatactacagtgcgttgcaaacgaacctcattcactcatttaattctacaaaataatctcgacaacatctcgtccaagacgcttctggagaaacgctggcagcgcaagtacgaaaccctgatgcacagcatcagccaattccacctggaggatgaatcgggctcgatgcgactcagccccttgcctacttacctgaccatccagaacattccacggcgaaatcgatcctacctgcagttggagaacaacttgcgcaatctgttcgattcgccgctaacccatccaccgccgacacctcaggatggaccaccctcgtctacacccccgccggccatcaacgaacctccgggctacgtcgctggtcaaagggcccgaagccgaaccaactcctaaaccaaccaccagggaaagggggagggggatgggcgcacttgggtatgtgtgcgcgtgccctttttgttgagaaagatcttattttacccgtagcgtacattcccaacaactcagtctgtaatcgaatcaaaaagtgctttagctagtaggataacaaattcagtactaaaaatggacgatatcatttagcgtttaagacctaggtaggaaactatgagtattaaccaaccaagagtggagaaaaacaccagacgattaataaatcaagtgatattttaatggtacaag

SEQ ID NO: 1104 - DNA, 2761 bp, Aedes aegypti
gtggtttcgcgatgactgacgactgacggttcggatttgcggatcggtcgtcttcttggtcgcggagtgcttgcgaaaattctacgccagagttgagtgattttttttcctgtggaaatttttccacaatcggagcgcgctggtgattgcacctagattgcaaaagaaacgagctcgattcgcctccgccaaggtagtgattgtgtcgtgaaatcgtcgctgctggtagagcaaaggaggacggaataattccgcggacgagaatcgacgcatctgtttttcctagtggcagcggtgtaattatcgtcccttttgctcaattattcatccatcggaagacgacctcgtcccactgttccaccagggaggaagtttcaaaggaaaagggttgcagacggaggaagggcctgtgtgttatcagattcctcttcttttggagggtcgttttcttatgctggacggaacagaagaagcaccaagaggagaactgtgaagcgattattctcttgggggaaagaggggaggaagactttgattttatctttctgccccaaagacggagagacagaggagaaagagaagaaggcagaaaaataacagaaaggagagagcacgcagagagaggaacactggccacagtttggaaacaatcagaataacataatgatgaacgaggagtcggcccccagtaggaatgtggtgtcacaattcttcaaacgaatttcgcagctgtaccagcttcagttggaccgatggaccccgcacaccaaggtccgatgggtggcggcaatcgtgctgatactgatcttcctgcttcgagtattcaccaaacagggctggtacattgtgacgtacgcactcggaatttaccacctgaatctgtttattgcgttccttacgccgaagatcgacccggccctggatctggatgacgaccagggcccagagttgccgacgagatcgaacgaggaattccgacctttcatccggcggttaccggagttcaagttttggtacgccatcagcaagagcacggtcatcggcatcatctgcaccttcttcgaggcatttaacgtgccggtgttctggccgatcctggtcatgtacttcatcacgctgttctgcatcaccatgaagcggcagattaggcacatgattaagtaccggtacctgccgttcacccacagtaagccccgctaccaggcggtgccgacggaaaagtgacaattaaaagcacaaaccttgccagcatcatccgtttcttcgtcgtcgtcatcgtcgtcctcggtcgcttcatcgtcggaggttgccgccagtactgcttccccagtagttccggccatggcaccaacagcacccgcaacctcaacggtggttccgatcatttcgactgtctaggagaagaataaaaaaccgtacggaaaacaacccaatcaaagaaataagcctccatcgagcaacatgctttcgaacaagcgcaggaaaagtcagaacccttacggccccattttgataagagactcgaggaagatcatccgtttcgttttgctctgatgagtgatttttcgttacacgtagttgcttcgattttgagttgtttttcagttagtaggtatgacgaatggaaacgatgattcagatgggttaatctgaaggagaaaatccgtttcaagaagcccatcaaaggcattgatttgtgcttacgtcgataaaattgtagaaaaccacgatctttttttgttttacactagaaagtatcaaaattatcatttatttcaactaccaaaaacaaaaattctagtttggctccgcgtcgtggtcgcctaacgcaaagcgtgtgtttgtgcgtttgggttaagagttatttcgggtgttacgaaacactcccagcaatagtgattattattatttccaccgcaaaacccccctttattttcgtagttgagtaatgctaggtgaatgttgagttagttcgttttattatttcgtatttaagggcagttccagtatatattttccccctattagtgtagtaggtttagcatcagactttcggcacagagctgttcaataatctttctctgtacatttcttatcacctcatcttttttcctagctagtgtcgtaactgttcaaatattacacaatcggtggtacacaaatgaagtacacacgaagaagtgtagcttcttcaaagttatcaactacccgcagcagataattctaactagattccgttgaaatttgcctttcttgtaaaaagttttgagttttgtgaacagctttttcgccgaggcagcacccattcgagatggtgtgaatacatgcatagaagattcatccgatgaaatgaacgtgaggcggtgaaacaaaaaaagggaacgcaaaactatttgaacaacacaatttaaagtaatctacattgagaaaaaaacattctttagccagaggacaaagcaaacaaaatatacacacacagacacaggaaggtaaaccgtggcaaccagcgcattgtaataagaaaaatcttggataaccaaataaatattacaaaatgaaagatggtttgagttagagagcagaggtttcagtgatgacagtctgaataatttgatcctacttatagttgccataaaagctattggtaaccacgtgtgcagcttcatttctgagcaaatcctcggtggatagagaatgatcttctctttatcatagcattggtctatagcttgtaaatctattcctataaggtaccgtgggg

SEQ ID NO: 1105 - DNA, 4789 bp, Aedes aegypti
caaatacgagctccctctctcaatggtagtgcatacttcggagcaccaattcaaattgcccagataaggccaagcctataaaaggatcgttcgatggctttgcagagctttagtatcgtgcaggtggatcgtagcggagttgtgcctaaaggtagtgtctcgggaattcgaagcagatcgtgaggaataagaagaaaggaagatctcagtggaatccggatttcgttagatgtcctttgaagagttctgtggcggtcccttttgggacggccagaaggaatggcggcaggacaatccggatttgaccttttgcttccaacgagttgccctgcagtgggttccctgtttcttcctgtttgtcttttccctgtacgaagtctacaagtatggcactagccgctaccgagatataccatggaattggttcaacctgtcaaagatgctggtcaattttacgttgatgtgcatgagctggatcgatctgggcatggttgtgacctacaaggacgagcatggcctgttcgacgtccagatcgtgacggcgatatttaacgccatatcttatattgtccttatggtactgatattctttcaacggagatatggcatcagaagctcggggacgatcttcatcttctggttcatgcgaatgttcttcggtatcattcagcttcgaacagaaattcaaaacaagggaattcgtggcgaagtaacgggcgatggcgttaacttttgggagttccaatacatcagctactgcattcagtacgctttcatctgtctaatgttggtggttgagttcttcccggatcaggaaccatcgtacagcgattacccggaatccaagaaaccaagtccggaactgcgatccagctactttgtgcggttgttcttcctgtacttcgactcgttcacgtggcgtggattccgcaatccgcttaccatggacgacatgtacgacatcaacccgcaagatgcgtccgcagagctggtgccaccgttcgacaaatactggtacgaaagcgtggagaagggtcgacacaaacagatggccgccgacaagaaagctggaaagacgaacatcaattacaaaccacactcgcaaaccaacggatccgtgttaccagcgattgtcaaagcgtacggagctccattctggtttgcaggtctgttccagttggcgatctccggactgcagtttgccaatccgtatcttatgcaggaactcatgaagtggatcgctttccatggccccaattggcaaggaattatattgaccttcggcttgttcgcaacatctctgctcatagcgttgttcaacggtcagtacttctacaacaccttcctgaccgggttccgcatccgtactgggctcattagcggtatctatcgtaaggcgcttcggatatcaagctccgcgaaaaaagacaccaccgtaggagagatcgtcaacctcatggcagtggatgcccagcggttcttcgaattgacttcctacttgcacgtcctctggtccggtccggtgatcatcgcgctgtgtatctacctgctgtacgacatcttgggagtggccgtgtttgccgggcttgccgtaatgatcataatgactccggttactggagtgatggccacgcagttgcgcgacctgcaagtcgaacagatgaagatcaaggacgatcgcgtcaagaagatgaacgagattcttggcggaatcaaggtcctcaagctatacgcttgggagaaaagtttccaagattctatcctgaaggtccgaagcaaggaaatcggcatcctcaagaagatggcgtactacggagcgggagtgtacttcacgttcaccattgctccattcctggttacgttggtttcgtttgctgtgtacgtattgattgacgagaacaatcacctcgatgcacaaacggccttcgtttctttggccttgttcaacattctgcgcatgccattgggttggcttccgatgatggtgaccttcgctatgcaggcttgggtgtcgatcaagcgtatcgacaagttcatgaacagcgccgaacttgacccgaataacgttacgcatcacaagagtgataaggcgctgtacattaaggatggatccttctcttggggtgatgaaacgctcatactgaagaacatccatttggcgctgaagaaaggtcagctgtcggcagtggttggcggtgttggaacaggaaagagttcgcttatctctgccttgcttggagaaatggagaagatcaggggttcggttaatacggacggcacgatcgcctacgttcctcagcaagcctggatccagaatgctacgcttcgggacaatattctgttcgggaagtcgttcgaccaaaagaaatacgatcgcgtgattgaatgctgtgctctgaagcctgatctggagatgctcccgggaggagattcaaccgaaatcggcgagaagggtattaacttgtccggtggacagaagcaacgtgtttccttagcccgcgctgtctacgccgacgccgatatctatctgtttgatgatccactgagtgcggtcgatgctcatgttggtaagcatatatttgaacaggtcattggtccacaaggaattcttgtcggaagatcacggctgttggttacgcatggtatctcattcctaccccatgtggaggagatcttcgtcatgaaagatggtgaagtatcggaaagtggttcttatcagcaattgttggatcagaagggcgcgtttgctgaattcctttctcaacacatccaagacttggatgaagaagatgaagaaatccaaatcctccaggaagccctgacggacgaaacttcgaagggtatcgtaaaacgtttagtctccatccgttcgaaccaatccgacgaaggtgtaccccggaaacgcaccagtcgccaggagtcccgttccagcatcaaaaaggatcaaccgcctcaattggctcccaaagcaacgctgatcgagaaggaagaatctgccaccggtgccgtaacgttagccgtctacataaagtacgtcaaggcgattggtctatccctaggtctgtggtcgatcatcttcagcttcatcacccaaggtagtggaatatactccagcatttggttgacggattggtccgaggatcctgaagctatcactgatacgtccgtccgggatatgtacctcggtgtgtacggagccttgggaggaattcaatcgatcgctctgttcatcagctctgttgcgttgggcttgggttgcttgaaggccgccaaggaattgcacgataaacttctcgaaagctctatgaggatgcccatgtctttctttgacaccactcctctgggtcgcatcatcaatcgcttctccaaagacgtagatgtcatggacaacgtccttccggcaaccatccgagcgtggctgtacttcctgttcagcgtcatcggagtgttcgtggttatcggaatttccacaccaattttcttggcagtcgtacctccgttgatcgtgatctactacttcatccagaagatctacattgaaacttccagacagctgaaacgattggagtcagtcacgcggagtccgatctactctcacttcggcgaaagtatcagcggtcaatcgacgattcgtgcctacaacgagcagtctcggttcacgcgcgattctgaggacaaggtcgactacaaccagaaggtatcctacccgactatcatcgccaatcgctggctgggaattcggctggagatcgttggcagtttggtgattttgttcgcggccctgttcgctgttctggcgagggacacaattgggccagctaccgttggtttatccatctcctacgctctgcagatctctgccacgttgagtttcatggtgagaatgacggctgaagtggaaacgaatattgttgctgtggaacgattggaggaatacactgagttgcccagggaagactcctggcagaagggttcagttgacaagagctggccgtcggaaggtaaagtggagttcaaggacttcaagttgcgctacagggaagggttggatctggtggtcaagggaatttctgtgaacgtcaaaggaggcgagaagattggtattgttggaagaacaggtgccggtaaatccagtttgaccttgggtctgttcagaattgtggaagcagctggaggcaaaatcgtcatcgacggggtcgacatttcacagattggtctccaccagctgcgaggtcgtctgacgatcattccgcaggatccggtcctgttctccggaagtctgcgcatgaacgtcgatccgttcggatcctactcggacgaccaagtatggaaagccctcgaactgtctcatctgaagacgttcgtaaaagggctgccagccgggctggagcacgaagtggctgaaaacggagaaaatctctccgtgggtcaacgccaactgatctgcttggctcgagcggttctccggaaaacgaaggtactgattttggacgaagcaaccgctgcggttgacttggaaacggatgacttgattcagaaaacaatccgcacggagtttgccgactgtacaatactgacgattgctcaccgtctcaataccattatcgattccgataaggtattggtgttagataagggtctcgtggctgaatgtgattctccgcagaatttgctcgccgataggagtactattttctacagcatggcgaagaatgcgggtattgttagctagtgagcgtttatgttgatgttgtgggtgtagtaataatgattgatattttatattgct

SEQ ID NO: 1106 - DNA, 2774 bp, Aedes aegypti
aaaaaaaaaaagggtcatctatgtataaaaattaaacttttacactttttgatatttaaatcatgatttcttcatgattctcatcaacggtacattcaaaatctgttttgcaccttcgtctttcatttagctcccttagtcgaaaatacatctacggcggctgacttgtcgtgacgatagcactgcgcaagctcgcatcccaacagaccagctctgtctggcccgtacatgcattggacgattagaatgatgctctctatatccaccagcaaagcaaagcacgaatgaaagtagctcaaactgaggtttcgaggcaactaaatagttgtattggtaaacgtcgattgacagagtgaaaagaagggaataatatattttcagatttttgcccatcagtcaaaaaatatagacagcccgagtgtgtagtgaaaaactaaagatctagtccagtttgtgtgtttttttctgaaaaacgtgaagaattttcgcattttcgtactgtttgtagtgcagaggtgtgtttttttggagttgattcgaagctagacaactagagtctcaaaatgggaaatgaaacgtccttgcccatggaattatgctcaaatttcgacgccgatgagatccgtcgcttgggcaagcgcttcaagaagcttgatttggacaactcaggcgcgttgagcatcgacgagttcatgtccctgccggagctgcagcagaatccactggtgcaacgcgtcatagacatcttcgacgcggacggaaacggcgaagtcgacttcaaggagttcatccagggtgtctcgcagttcagtgtcaagggcgataagctgtcgaagctgaagtttgccttccgaatatacgacatggataatgacggcttcatctccaatggggaattgtttcaggtgctaaaaatgatggtcggaaacaacctgaaagacacccagttgcagcagatagtagacaagacgattgtgttcgccgacaaggacgaggatggtaaaatctcgttcgacgagttctgttccgtggtcggcaataccgatatccacaaaaagatggtcgtcgacgtctaagggaaacccatacatccacacacacacacgtacacacataattataagcatatactgatatatacataaaaatacacttttactttctagcaaaaagaaatcttatttattaagtaaaaaataagcaagagtgtatgtgaacgttgcatctgatgaaaacaggaaaacacaaacgttgtattttttttagttgtttctatgttgtttgctatcaattttttccttattatcataatatgaaaatgtattaacactaaagaaaaggcatagggaataagatctgtcttgtgtgagaaagatttaaaactaaacgtgcgcttgttttcaaagaaaggtgactttttccctcaaaatcaatcacgcaacccaatagtgaaacacaaacataattactactgtgcatttggttgtcgtactgttcatctacggtaatatatttatttatttttttatactggtaatatccactccctctctgttttaacgttcaattcatcggaagtgaaacactatgcaagataaaccaaaagtaccataaaaagtgtgcaattcaaaggcattgctaactattttaacatgcgaatcttaaggcaatatatttaacataaaaatgatagcatgcggctcttctaactgtcacggaccactacaagcacgttgatcgaaaacaaacccaatattggagtatcgctcgctgtaagtacttaatggaacagaaataaaaacaacaagctaaagtaaatcaaaagcatcatcaattactactaatattatacactttcacgcaaacaaacacacacatacactgacataaatatgtaattgtcatccatgcgagaaagctacgttaaatgcaaatttaaattatagaataatttccaacctttatttgtcatagggcttttgagtatgtgaacagttgagagcaaaacaaatagatatttaacaaacttattgccactgttagagattatatcgtatgtcgtgaatgtctagctaatttttccccaaatttaattgtacatgcaaaaccataagtaaaatggacggataaaagaagagtactatcgtagagtcataggttaggagccaatttttctatacactatactgttgttgagtcgaaaacttattatcccgttcatcccgattgaattgcgctgctcccatactgttttataccatccgttgttactaatatgaacaaactttattgattcggaatgaccctcccttttaacgaaccaccgttgattaacgctcttcgtctatcgatttgatagatttagtctcgccaaaaaaacaggtctttctgttaaaaattctccatttttgtaatccataggtcattgaaatgttgttgagcacacgtacacacctactatcgattaacaaagcattaaaataacagcaaacatcggaattttaaaatactacccatcactagttatatactgaatagtcaacattttcttttgtattggcgtgtctgacgacagattggcacgaaataaaaacttgtttcagttgaattgtggctgtcaaagctgatatacaactaaaacatggtttgttgttaatcccaagaaaacaatcccaaacctttgcaccaatcaatccaatccagtgcaatgaatcggaaaacaatgctgtttgctcgcaatagaaaaaaaaaaacaaatgtgcaatcaactccct

SEQ ID NO: 1107 - DNA, 1476 bp, Aedes aegypti
gcaattctgtcatcgacgggtggtggcgttaatttaatattggcgatagtggcaactaagctgggaggtttcatttcccagggaaaagcggaatacgtgcgaaggaaaccttgtgtaattgtttcctgataagtcgtgcgatctcttggagtttccgaagaagcgagatccggaatcaaccttcggtggataagtgggaagaaatcagtgtgactcatcccaggttttccagttcaagtttggcagcaaatcgtccaaaaccgagcagcagcgacaatgttgatcaaagagtttcgagtgacgttgcccctaacggtagaagagtatcaagttgcacagctctactcagtggcggaggtgtcgaaaaatgaaaccggaggcggcgagggaatagaagtgctcaaaaatgaacccttcaacaactacccactgctgggaggcaaatactcatccggtcagtacacctacaaaatctatcacctggcctcgaaggttcccgccttcatccgactgctagcgcccaagggatcgctggaagtgcacgaggaagcctggaatgcatacccctactgccggacagtcattaccaaccccaaatggatgaaggaaaagatgatgctgatggtggaaacgctgcacgccgaaggcgatggagagatggaaaatgctcatgagctgccaccagagaagctgaaacagcgcgaggtggtacacattgacattgccaacgatccagtgactgccgctgactacaaagaaagcgaagaccctaccaaattcaaatcggtgaaaaccggccgaggaccgctggtcggcccggactggaagaagaaggttcagccggtgatgacctgctacaagctagtcacctgcgagttcaagtggttcggactgcagtcgagaatagagaacttcatccagaaatcagagcgaagactgttcacgattttccaccgacaagtattttgctggatggacagctggcacgggctcaccatggaggacatccgtgaactggaggacaagaccaaagaggaactggacaaacagcgtcacgtcggcgaagtgcgcggaatgcgcgctgaaacagactaagccgtcttctagcgtgttttgggaaagcgtcgtttaagaatggtcctggttacttggcataaacaatgggaatgggaaaggaaatacaattggataccggatattataatcgacagtttaacagttgtcttggaaaatacaaaatataataaaaaaaatctaccatgtggctgactcgtaagcggaaaacaacagtaattatacaatgaatgaaacaattacaactatagcaacagaggtacacacatactggtatagtcacacctacagcaggtgcactacacatacacataagatagtcagaagcaggaatccatatagacactcggaagaacacacaaacacacacttaacaacagaagaataacacaaacacacgaa

SEQ ID NO: 1108 - DNA, 1560 bp, Aedes aegypti
atggcgtcgatagattcgcaggcgaaaaaccgaatgcaaggtttcaaaaacaaaggaaaagaccaggaggaaatgcgaaggcgtcgcaatgaggtcaccgtagaactgcgcaaaaacaaacgcgaagaaaccatcctcaaacgtcgcaacgttccgcagacgacggccgaatcgacagacgaagacgactacacctcgccgtccaatttgagcaaactggtcgagaaggccggaaacagtgacgacaaagacgaacagctggccgcagtccaggcggctcgacgcttgctctcatcggaccggaatcctccgatcgattccttgatacagagtggcattttgccgattctggtgcgttgcctcgaacgggacgacaatcagttgctacagtttgaagctgcttgggcgctgacaaatatcgcatcgggaacctcggcgcaaaccaaccaggttgtacgtgctggagcagttccgctcttcctgcgtttgctcggatcgcccgctgccaacgtctgcgaacaggctgtctgggccttgggcaacattatcggtgatggtccctgtcttcgagattacgtcatcaaactgggcgtcgttcagccgcttttatcgttcatcaagccagaaattccaattccgttcctgcgcaatgtcacatgggtgatcgtgaacctgtgtcgcaacaaggacccaccgccaccagtggacacaatactggagattctgccggcgttgaacatgctgatccaccacaccgatattaacatcctggtagacaccgtgtgggctctgagctatctcaccgacggaggcaacgaacagatccagctggtcatcgacagtggcgtggtaccgaaattgatccccctgctatcccacgtcgaagtcaaagtgcagacggcagcgcttcgggcggttggaaacattgttaccggttcagatgatcagacgcaggttgtgctcaattgcgatgctctgtctcacttccccgcgctgctgagccatccgaaggacaaaattcgcaaggaagcggtctggttcctgtcgaacatcaccgccggcaaccaaacgcaggtgcaggccgtcatcgatgccggattgttgcccaagatcatcgagaacctgagcaagggtgaattccaaacgcagaaggaagcggcctgggcgatcagtaacctgacgatcagcggcaaccgcgatcaggtggcacagctcatccgggacggtgccatcccaccattctgcgacttgctgacgtgcaaggacacgcaagtcatcaatgtcatcctggacggaattaacaacatgctgaagttggctggaccgcacacggaggaaatcgccaacatgatcgaggaatgcgacggtgtgtcgaagatcgaggttctgcaaaatcacgagaacatcgaaatctacaagctggcgtacgatattatcgagcagtttttctcggacgacaccgatgaagcagtgctagacgagctgagacctgcggcggatgagaacgcgttccagttcaaccagaacgccaacgtacccagggatggattcaacttctaa

SEQ ID NO: 1109 - DNA, 3044 bp, Aedes aegypti
actcgagcacgcccggctgcatggcgatgaccacgaggattcctttccggatatacaaccgatggatgacgacgaggacggggaggaagaggaggatgaggacgatgaggataacggaaacgagttcatcaccatcaatgtcaccaacgagcagggtgtcaacaaggagctggagcacatcaaggagaagaaggaaattccgaagcctcacgtgcatcacctggcggggcactacatcggcaacattactccaccgaagcacgaggacatcgacaccggacaaaaccacctggacgaggatcatcccttccgcaagtactccaagatcatctgtctgttcatcacgtggatggtgatcatcgcttttctggtagtcaaagacgaaaaactggtccacgccaagcaactgtcgattccggccggcaaaactaggccctacatcctgcccaagttgccactcagttccaaggttaagttctcctttgaggggacgtttctcagtgagcaatacaccaacattacggagcactatttgaccatttacttgcaatcgctcacgtcgactctggagggtaatgatagtgaactgctgaattcggattctgtgcacaatattagcgatccctggcacgtacccatcgtccatccatatctgtttgacagtgccccgatcattaagaagcagcacagcttcgatatcagcgataacaatttcgagcggattcatgcgcagagtagcgcagtccggatgatggtaaagagcaatataaaggctagcttcccaattagtgtgaagtatgatcaaagtcccgtcaatcgcgacattggagtgatctacgctgcgtttgtgttgattttcctgtacgctttgatcatctgggaggtggttcatcggacgtttgcggcagtgatcgcatcgacactggccatctcgatcctggcggctctggatgatcggcccacgatggaggacattgtcggttggatcgatgtggagacgatcctgttgctgttttcgatgatgatcttggtggccatcctggcagagacgggcatttttgactttttggctgtttatatctataagattaccaacggtaaaatttggaacctaattcactgtttatgcatatgtactactctgatctcttctttcctggacaatgtaactacggtgctcttgatggctccaataactataagattatgcgaggtcatggacatgaatccggtaccggtgttgatggccattaccgtccacgccaacatcggaggaacgatgaccccggtgggcgatccaccaaacatcatcatcacgtcgaaccagtacattttgaaacacggtgttacatttttaacctttactgctcacatgatggttggcgtgatcattgtcgtaattgccacgaacatccatctccggttgaagtacaagaacatcaacaaccttcggatgcacgagcccaaggaactgaaggagctgcgacggaacatcaaggtttgggaacgggctgctggcaagattcccccgtattcgaaggatgccaatatcgtgcgggaaacgttgatgaagaaggttcggctgttacggcatgagctgaagaagaaaatgaccaaaggcagcgtgccggaggatctgtaccggacgaccttggaggaactgcagaaggaacaccccatcaagaacaagggactgctgataaagtccggagtggtgtgcgccttcatcatttcgctgttcttcctcgagtccatcccggaacttcggcgaatgtcttctgggtgggcagcgttgctgggtgtgatgctcctgctgatcatctccgataaaaacgacatggacgccgttctgtcgcgtatcgaatggccaacactgctcttctttgctgccatgttcacgctgatggaggccgttgaacggatgggactgatcgactggatcggtcatgctacggagtcaattatccaatcggtatcggaggatctaaggctggcggtggccataataattattctgtggatttcggccctaacatcggcttttgtggatagcattccggtgacggctatgatggtcaagatcgtggtggctctgtcggagaagtcgaccctaggccttcctctgcaaccgctggtttgggccttggctttcggtccttgtttgggaggcaacggaacactggttggtgcttcagccaacgtgatttgcgctggaatagcggaacagcacggctatcggttcagtttcatggactattttaaacttggattccccatcatgttggttagtgtgatagtaacgacaggatatcttatcatggctcacgtagtgttcgcctggcattgagaatgcacccctctgaacctgttggacccggtttgaaaccaataacaacacatctaagccaaaacgctccaaaaaacccacaccgtttgtacgtcgctaaaagtgaaccacaatccatccctgggatgacaagtcatttgtatttataactgcattattaaccactttataggaagtaagtaagcagaaacaacagtgctgttaagtgttctagtgctacttttctatgttgtcataagcttagtttcacgtacatatgttatcgaaaatgtccggttttcgaattgcctctctgaaatttttttctctctgtccgtgtagtcacctatgtttgtcagtcagagtaagtgaaagttttagtatgatacgaaagttgtagttcaataaattatgccaatcaataggtggacaaaatacagttgatgcatccgaaatccttttctggtgttttgcttatttcaagcatgcgatattttggaatacagtctcatcatatcagcacctatgccactaggttttcctctatatcaatagtccgtatatcgattccaatgaggtccacaaagccaatggctcgaccattttatacattcatcatgtggcacgcatgaaaaaacaacattgggacattacattaagaattactaaatgaaattcgaatgtttgggatattacatcaagaattacataataaaaa

SEQ ID NO: 1110 - DNA, 5095 bp, Aedes aegypti
agtgtgatttcgttcgtcatcaagcaaagaggttcgccgtgagaaagccattcgcgagttttattgtttcggttcgtccaaattcccattagtcacaaacggtaacatcctttctccagaaacaatttgttcgcgaatttttttcatatctagcacagcatcacgcaattgaaggaaggaaaatagtgaaatccaaatcccgttgtgaagtgttctgaattttcgattgaaactcgcaaagtggaatagcgagaaagagtgcgagtgtgaaataaaaacgcagtgaaaagcaaaaaaaatcggaaacagttgcagcaaaagcaaaattattgtgtgccagcgagcagccttctacaacacacgcaatatctctgtacatagatccatcggccagagcaaaccaaccaatcatccagaggtgcagcattgaaagtaagcaattaaacagcaagcagcaattcacaagaaacagagaagaagagtggttttgattttctacgaggtcaagaattttgcgttacacccacccaccaatcaatttaaagaacaacattgaacggtttctttgcggagtctgcctctgccaggagtaagctagaaacttctctgcattcttttttacttttcggtttacttctgttgtgacacgactcgcaatgttttaccgttgactgttaagtgctcctctctgctttttagttgtttgccagttatgactaaggtgccgaaatcgtgttgaaaactgagctgagtgttattttcttttcaattcccatataaataaccacccacatacgttccagtgtgctacagagtggtagtgtatcagtgttacaattaagccgaagagaataagtttcctgtgacagcgaaatcagaaaattgataacctaatcagaaaaatcgtgagtgtatcgtattattggtaccgtatagcaaacactatcaactgcagcattagcagcttaaataatcactagagagctacaatacctacaacgtttgcgccatcccataaccagtagacgaccttagcagcacaatcattccatcacgatgaaacgaaacgacacgcaaatgaatgtcgctggcatacggcgaaacatcaaaaatcttgcacacaactattctgatgctcaggtcaaagtgcgggaggcgacctccaacgatccatggggtccctcgtcgaccattatggcagaaattgccgatctaacatacaacgtggtagccttctcggagattatgcaaatgatttggaagcgaaccaacgaccatggcaaaaattggcgccacgtttacaaggcactgctgctgctggagtatctcatcaaaacaggcaccgaaaaggtggcacaacaatgcaaggaaaacatatacgccatccagacgctaaaggatttccaatacgtggaagagggcaaagaccagggaatgcacgtgcgagaaaaggccaaacagttggtgtcgctgctgaaagacgacgaacggttgaaaaatgaacgtgcgagggcgttgaaggcaaaggaacgcttcgcccggacggccagtggattcggttccgatggttccatcgatgggccaaccaccagagatgctcgccctccgaactggggcgaaggagaaccaaccggtcggccggtgtcggaaatcgaatttgtcaggccgcagacggtgggagaggaagaactgcagcttcagctggccatggctatgtcgcgcgaagaggccgagcaggaagaacaaaaacgaagaagcgatgatgtgcggttgcagttggcactgagccagagtgagcaggattttaaacatgatactaaaccagccgatagtgccctggtcgatttgctggacatttcgtttggggcagccagtatttccagtccatcacagcagcctggtccttctacgagtaccgatccctggggattaccggttgccggaggatcgaggccacagacttctgacccatggtcacggacgtcctctccgccggtggtcgatccctggctgaacagtgcttcggcacttccaccacccgcatcgagaccaccggtggcagccgccggcgtcggattggatgcttgggctccggcgcgaactcactcaccctcggtcacatcgggctcatctgtggaaggttggctccagaatggaaccggtgccggagcgatagcccccgctggaacaaatggaaacgtcgatccgtggcttaagacgtctgctcccagtgcgagtgaaccgtggcaggctaaaagaactacaccagtgcctacggctgatccttggcaggctcctagctcaaatccagccaaacaagatccatgggcaccagtgggagatggagctttcccgctgcctgcacatcgaccatccccagtgggagctattacctcgccagcctcggacctcgatgagtttgatataatcaccaaaaggagtaataacagcaatgcagtcaacaacaatcttaacaacaatggtttatcgttactggacgacctggacccgctatcgtcgagcaacacctccagttcagccagcaattcaactccctcggcaacagcgacgacaacgaagaaaacacctgcctcgttcctcggcgaaaactcctcgctggtcaatctggataacctcatcaaaccggtgacgacggcaccgggggcaggagcgcctggagcgccagcctacaatcccttcggtgatgcagcgcctgtgcagaaaaacctgttccaacagaatcaaccacaggttccgtccataaatcagctgaaacagtcgccgttcccagtgacgctcaatcaggatccgtgggcaccagttaatcctgctactgcggcgcaaaacaacatcaacaacaatgccccctggatgaatccgcagtcatcgaatccattcctatcgtaagactaatgcgccaacactatagcagaaccatagaaaccaaccaatagcaattttactagatccgaaacacagacaactggcagggaacaacataagagcgaagaatcgtgtagtatcacgactgaatacaacgatagaaagcggaaacccaggttacttattacgatgcaaaatgaaaagcgtatatccgaaaaaatctatgttgatcagagtaaattttagtttccaaaactgtagatatgattgtaaatcaatagtgactaaaaataaagcgactttctttgccctcaaactcttcaaaagcacactacctacaacaactaggaaaaaagagccctgatagaaaccaaaccaaactctcgtagtaaacagctaaattactaatagaacagaaaaccgtggaaaatcataaatgccttactaagtgttaaaatgaacataaggagaataaaattagataacctaaacgactgttgataacaaaaaaagaacaactaattgggatgagctctagaaactcatttctgacatttttgagctaacaagcccaactacatacaaagataagaagtgtatgtgcatatatgtaggcgcacttctggtgtaatgaaaaaaaaagtttttacggcttatcataaaactcaattttgaaccttttttctaacaaaatcaaataaaaataaaatatacttcttttgtgaatgtgatatctgttaccacacatacatgcagttgaaaaaaaaactgtggaattaaaaaaagaaaacaatttgctagaaatttgaacactatgagtagaatactctgtttggaaataaagagattaggtatgtgaacctttcagtgctgcccttgacgatatgcggtaatcggctacctacaatcttcactccacaaacgtggttacaaccaacaataccgcgaggaaaattgcaatagctaattaaggttaatcgaaacacccgtatctgccaatggataggcatcataggggcaacatttgaatagcacatatgctatatttcattaaaactccaacaagagtagagattttgtgcgtcggagagtgtcaaatagaagttggtactatttttggatggttttctattttaatagtttcaatcaaaactaatcccatagtaagattttctacgtatgtttctgatgatggtttcaactggattaattgctttaaacttgtggaaaaggtcgtgggtagtagaggagatagtaggtatttgaatttctgcgttactttatcgggtggatcaaagtaggcttcgcttttgtgcctgtaatgtctcactagaggaaaaaggggaataaatcaaagtaaccatttgagctttagttgtaaactacagaaacaaatacgaggacgtcgaagttagatgagaatgctacgaatactggttatcatgaaaagtattgtgacgaataaacgaatgagggatcattatatttctgtttacttgtactgtgggaatgtaagcaacatttactgctactatttatttgaaaataatatagcaattattaacgtggtatgtaaagtatacaagcatcattcaaaccaatcttgatacaaatattttttttttccaaaaaaaactgctttacttgtaacaattaataggttttttttttattacaagaaaaaaacaattctaattttgaattggacagacattatgcacatattacataatcctgaaattgacattttaacttcccccgtttgtaaaactcttcggtgataatgcttgaacaattgcagaattacgtaatttgtgcccgatgacttttctacgagtaaagatatacacatactctgctgaacagatgaataaacaaccgaagcaatagttttttttccgttggcatctcgttttttggtttccatttcgtctcttgaaactaagcatcagataggcttggagttgtaacaaaacaaaaaagaaacaaggtcagaggtttattttttgcttactgcaattaactaattctaagagcagcagaacacacatttcaatttcgattgaacactgagacgacacccaagaggaagagataaaactggaagaatgtatagagttaaaagattatttagaacggaagaatgaaattatatatattttataaaataaatcgaactgatttcaatacatgtccaacggacagtacggca

SEQ ID NO: 1111 - DNA, 3995 bp, Aedes aegypti
cattacgatattcaacatattttttatgagttttttttaactttcttcaaaactgaagacaatattcaagccactaagcttgaatatgcatgtagcacagagagaagcaaaacattatggtatatcaaccatcaaccaagcgcccccattagtttgccatattgcaaggcggcgcatgttcggtaatgaaatggatgacacacgcgatcccctccagtacggctatcagcgtgtcaacaccggagaaggatctctttccacatcgaccacgggcaccagcttggatacgatcgtgttggatacgaacgccgaagacctgaacagtacccctcgggtgggagcccagcgcaccttcagtcccatcttggaaacggacgacacgaatccgttcctggatccgccgccaccgggccagaagtctccgccggcagtgggcgaagcgaaggccaagagcaaatcctcactcaaggggtcgcgggtttccttcgaccaggaggaccggttcgatgaaaccgatgagggctttcgcaagcagcgggagcacttccagaagcacaaaagccacagtacctccgagcacaagaatcagctgattaaggagctccggcatctgctcgctgccgacaaccgccgccagttccagggcaaaaagcatgtttccctggacgtccaaagttccaaggtgctcgaggagctgctgaaagcgtcgtcctccgaggacgacttcgagggccagcgcaaacagttccaggagcggaagcacaagagcctcgacgctcgacacatttcgttcaagttcgagaaggaaccgacgccgtccagcagtgaagaagacttcgaaccgtcgacctcgttgctcaagatagacgccgatatcacaaagcccgttatcatcgacttgaaagtaaaccgagcgcagtccgatcaagccttgacgcaatttcaaaaaaatcttgcccattttcaggacctagaatcgagcgaggacgaagattacatttcctcgcggaaacatttccaacaggcgaagtcgatgagtaccgactcgcgcaaaagcaacaaaagcatacgtttcttcgagatggaaatgggcactaaggaagaaaatattcggaccgccgttcccttcgtgcgacaaatcacggaggacggcaagccaaagctcgaagtgtaccgaccgaccaccaatccgatcttcatctggactcaggtcttggcagcactatcggtatcgcttggttccatggttgtaggattctcgtcagcttacacctcgccggcgctggtgtctatgaaggatcgcaacattacgtcgttcgaagtaacggatcagtcgggttcatgggtcggcggaattatgcccttggccggtcttgctggcggtatccttggcggaccgctgatcgagtaccttggtaggaagaacaccatcctggcaacggccactccattcatcatttcctggctgctgattgcatgtgccacccacgttgcgatggttctggtcggtcgtgctttgtctggattctccgttggtgttgcgtcattatctttgcctgtatacttgggtgagacagtgcagccagaggtacgaggaacacttggactgcttccaacggctttcggtaacatcggtattcttctgtgcttcgttgccggaaagtacatggactggtcaggattggcgttcctgggagcggctttaccaataccattcctgttgctgatgttcctcatccccgagacacctcgttggtatgtttcacgaggacgtgatgatcgagctcggaaggccctgcagtggctccgaggtaagaaagctgacgtagatccagaactgaagggcatcatcaagtctcatcaggatgcggaacgacatgcatctcaaagtgctatgcttgatctaatgaagaaggcaaacttgaaacccctgctcatttcgcttggcttgatgttcttccaacagctatccggtatcaacgccgtcattttctacaccgtgcagatcttccaggatgctggatcaacgatcgatgaaaatctgtgcacaatcattgtcggtgttgtcaacttcatagccacgttcatcgccaccatgcttatcgatcgattaggtaggaagatgctgttgtacatctccgacgtggccatgatcattaccctaatgacgcttggtggcttcttctatgtgaagaatagcggacaagacgtttcacaagtcggttggttgcctctggcagcattcgtgatatacgttcttggcttctcgttaggatttggtcccatcccatggttgatgatgggtgaaatcctgcccggaaagatccgaggatcggccgcatcagttgcaacggccttcaactggtcctgtactttcattgtcacaaagacgttcgcagatatcatcaatgccatcggaacgcacggtaccttctggatgtttggatccatttgtgtgatcggtttagcgtttgtgatattctacgtgccagagacgcagggcaaatccctggaggacattgagcgaaagatgatgggccgcgtccgacgaatgagctcggtggccaacatcaagccgctgtcgttcaacatgtagaaatatgttaccactctcagtgagaatgatcgcggattagtcttcaattgttagtaggataatgccagtcggatggtacgctcgagatagggataaatcagaacccacgaacagccatagcaaagcatgctaattgctccttagtaaaccgtgcctagaatgttcaactttagcatccttactcggagggttaaaattgcgagatttaagattagacaaacaaacaagagattttttgtgataaaaccaagagaacgaaatccagacagtgtccctcatagaggaatggttgacaaacattgacaaacggaagtaacataaatcacgcaatagttcaaaactaatcaacgttagtctagttgctgccggcacaaaaatgcatcatatgatgattgatagatggatttgcgaaaacttattccgtgttttacacggaaatcactaaaatttgctagatgaaaataatgagattgagaggcagctaggaacgaaagtagtgaagtatccatgtatatatttttcaaacgatagaactcagttccttttcgaagataatttctttatttttaactatgtaatgcttggacgctatagattaataaggtagacagaaaaccgcttcatgacaaaattggtaccaaaaattaggttatgatttaaacatttacgtcatcccacggaaggctagggaaaatgttttccctgctcgattccaaaagagtgcaagtggtagagcgctggtagacgaatctcaaactgaacatttcgctttgtctagctaagtgatgatttcattattttaatttcatacattaagcataacgaatagcataaatcttatgtatgacacaatgattatttaatgtaaaatattatattgaataaataataatttatacgaataattattgattgcgttattactttgaaattgtgttttgccaaaatcattcgctactgccacatcatcatatcattgatctatcctgagttacatgaaacatgggcgtgaccgggaatagcgaatctcatgctatcaattttcttgttcaataatgaattacacctcagctttgattctcgaactcaagcctaaattactcaagtccgaacatcataggcccgcatagaaaaacttgaatgccgctgctgaatgaaagctgcagcaaactagcatgaaataatagctaactaatagattaggtgagtgggtgctatagataagcatatttgaaatttaccatacatgtcttaggggtcgtcgataaaccacgtgatcattgaaaaatggaggggggtgtcggccaaatgaccacgaaaagccacgctgaagggaaatgggtttagcaaggtcaaccacgtgagcgaaaaaataaatcaaagaaagtgttgttttggc

SEQ ID NO: 1112 - DNA, 5323 bp, Aedes aegypti
tgcttctatgcgggcgcgtttattttctgcggaatctacaacgcattttatttcgagtgtcggaactcgtatctcattctcattctccgatacggaaatctcacgtataacttcgatcatcgatgacatcacacacgcacacttttgcgcttttcattcatgaaactcgactgaaaatcactttcttgctgtgtgtgtgcatgcgtttccttcctttgttgcgtcgcgacgcgcccctcgccccatcaatgatgtgcaccgatgacgatgagaagattttcgtttcggtcgggtcggatgacggaaccaatctccgagcactgattttagtgtgtgagttgccttcgttcggagcagtagtcagtaaataattcctctccctctgtgtggaagaggaaactcgctcggccataggtttagagagggtgcaaaaaaaatctttatctttagcaaaacggagaaacacgcaatagaataagcagctcggtgctcggtcggaagtttaaaactttttcgcgagtgaaatcctcccggggaggatcggaaaagtgcagattttggctgccgaaggctggaaaaatctggaatctggacagacctccagcagcggagtggaaattttcagctccgtgtggctgctgaaccagtcccagtaggcctgagaaaaaaaaacggggcgtttacgtggtgatctagtaagccgaactttgggtgcaggtgaccgtcgtcgagggctacagtgtggtcggaggaaagtgcttccgtctcgttgagtacctgcagttgaggatcattgggcccgtttcccggacggaacttcggttcggatcgaaaaggctgaaaaagaaagatgggaaccttggtggccgataatggtattcatcagacggaattgttgtctatcgagtcgttggtgaacgagttctaccatccgggtacgtccaatgccagaaaacacacgatcgaaggtcagctacagcagtttcagcgatcgccacatgcatgggctctgtgcctgcagcatctggttcagtttaacaatcagtacttttggttcttcaatgtttctaccgtggaagtaaccatcagccaacgatgggtatcactggatgaaaacaatcgagcacaaatccgggactctctatggacgacgtatgcggggttttcgcatgacattccgggtatgcagcgagataaggtcgcacagttgatcgccttgatcgggaagcgacagttcccggaagagcatccggattatatgaaccaggtactggagctgctgaaaagcaagttcatcctaggcgtaaccctgctgcgatcgacgtccgatgaaatcaccagcacaaaggccgacatcacaagcgatcgtcaaaagtacctgtcctattgcgtttcaatgtatctcccgtcggtgttcgaaatcctcgagaagtacgctgaactgtgcatcacacgaactagttgtaagaacggaataagcttggcacatctgccgccccctttcggtgacgatgcgcgtgtcgagcaagccaccatggatcttctgctgtgcgttcagcaaatcttctcctgggcacccctcgacaacattacggagccgcacttcttccagagtttgttcatgctcgcgcggtggaatgaggcgttcaacgatgtatccatctcggctttgacgacaatctctgagctattctaccggcagaaacctctaccgttgccgacggtcatagctaccggggtgattgatctcctgcagcagccaacgctcaagttgtccaacgaactgtatcaggacaagctaaccgaactgctgcgactgttcacctcgcagcagtggtccaagtggagcaaggatccccacttcccggccatgtcctatctgaattcgctcttccagtacacgttcttcggctatggagcgttggcatttaccgagcggttgacgatttggacgccgattgtgcagagctttgctgcgatggctgagaacggtgcggtgagcaagcatagcgataagctgatatcgcttgcgtccggaaccatgaagcggatgttgttccagtacgactttgatcagcaactggagatgttggacaacgaggagctggatgacgataacgaaaccgagctgcagcacttcttcaaccagtgcatcgacacgatcgccctcatcgcggagatcgaacccatccgggtgtacgatatggcgttctccgagttcgcatccgatgccagcggtccgtacggccaagtgctgtccactattggcggcatgttgctaaacgggtccagctacatttcacctcggcccgcccatccgctgctggacgaagaaagccgatccgcgctgcggtgcaagttccgtgatttcatttcgctgtgccaaatcattgctcgggttagcccgttgctgcacgaacgctcggagaagatcagcgcctcgatgggacggttgatcgaggatctcgtcaagctggtggagatggtgtcgagcgcctcgggtgatccactggagtacttcttcgtgaacttgcaacccctggccggggagctggcggatgtgatcggacagacgctgatcactttgcgaagtctactgatcgtaacgcacattccatttggggaagccgaaatgatgcattttctcggttgcattccgaggtttttgtcacctccgcagaaggtcaaacgggaccaactgaagacgctgaccagtgcagcggcacagcttttgctcagtgtcagtgccaatctgcggccaaagtaccttgtccagctgatcaaaccgctggtgcatagtgatttgaggcatttagagcgatcgacagcgctaacgatgcggctggccatttgtaattgcttcgtgctaccatgggcggggtgttcggcagcggagcagaacttcgaaggtcgagctgcccttctacaggaatacattgcatttatagccggtgatttgattaggttagatttgggccatacgtttagcagtagtaatccatcgttggactacgggcaggaggagaagatcgtgacggtagccacagtcgtacttagcactctgcgggatctgctggagtactaccaagagcaaagcagttccgtcaagcagatgctagcggccgcataccgacctgtgatagagaaaacgttagccatttacagtgcagccagcagcaagaattgcgtgttgattgagaagatattcgagttttgtctgggaattttgaggaccttacaggtccagttgggccaagtattcttgaagaatattatcctactgttcctggggaagaccaaaacggaacagatcagttcgcagcgtttccgttcgctggtcattttgctcaaaatgttccttctaatcgtagaacaaccaggcaatgcttcgctactgccagacatattgaacttttcgatcgatcacgtactgccgatggtattctcaaacgaattcatgtgcaaaagtgaacaaagtggccatgccgacgttagtttatcgctgtatcagctgttcaacggaatactgctgcaacggtggcagtacttctacaaatcgagtgtgctaaaacagttgactccgagctcttcggggaacattcagcagccacagtcggcgctggaacatccggaacagtttgcggccattatgaatgcttacggtcaggcgatcgtatgcggaaacgatcctcacataacacgtgccactctgcaatcgttggaagcgttaaacgaccggtggaaactttaccagcgggagtttttccgcgagaatctgctgcaatcgttcgaagctgccatcatcaaggctctggtggctccggagggaatattgcactacgagctgtttctggctgtgctgttcagcatgggtcaggtggagacgaagcgactgcacgagacgttcaccgggatcggctttccggcggaatcgcaacaggtcgaggaggtctgcttggcttcggactacccaacctttgctcaccgtatgaaccagctgatacaggacaccaaatgctgccagctgaatggttccgcatcctaatcacgaaacgccatcgccagcagcaaatagcagcgtcgtcgtcttcgtagccattgccgtcgtaattctcgtcacatcgtcgtcagccatcggaacggactttaactttattacatctagaactactaactctctatgtctcattcacatctcccacaaagaaaattttcaaatcaaagtcaagaacaagaccacattggttgagagaaccaatcttttagtcggatgagaaacgcgtggggcagaactgaaattcacgaaaattccatacttttttactaatactaataacgatcgcaacttaagcaaattaaaaacaaacaaaaaacaatcgagagattagagtaaaacgcgcgtcccaggaaaattctaatataataaaattatctaaatcgagtagcgttaatggaatcgaaacacaaatttatcgtataccagggtggtgaaaagcatgctcttctattcgtgtatttgcaaaacacacacacacaaacgccgagattcgaattaaaagttgcgaaagagatctacaaatctagcaagaaaaagcatctatttatgtttcttttaagttgatatttgcttttgaagatcaggtaaaacttgtaaagcgtttatgtcgcgccagctatgtctgcggtagggttagaacacacaatacaccacacacacatcgaggaggtgtcgcaaggccgtgctaattctcctattattgaagcatctaagtcgtaaatatttgatatcatattatcaggattttatttttataataatcaagtgtaacatgtgatattcagaaggattagtttttatggaaaaaatacaatttttgccctagtaccgtcaatcaaaaagagatatgctttatttcgtttcgttttgtcttttcagtctatatgttcgtttgtggcagtttcttcgtttagttctttgtatcaaatctgtgcacaagctttatttatattataatcacaaattttatctctaaaaccgattctttttcgtgctatcaaaatggaattctaatgcgagggagaaggcgaaacaatacagatacatcaggaagtagtattatacacatatggtttcctagaggaatgataaaacaagagaaccacatataaacgagttccccttccccctttgaaatagagtgttagagcataatgaatatattccgcgtaatattttccattgaagataatttccaggaaacttatagcatcctacttctagccgagcaataaaaccaagcggaagctgcatcaataagagtaa

SEQ ID NO: 1113 - DNA, 1980 bp, Aedes aegypti
agcgaaatgttgcgattgccatcgctaatggccaagagcgccctgtccgcggctcgcggactgtcggccgccacgtcaacgcagcgcggattgcatttcaccgtcggccagaacaatgccaaaacgaacccgggtgccatctcgaaggaatacccggtggtagatcacacgtacgatgccgtggtggtcggtgccggcggggccggtctccgtgccgccttcggtctggtggccgaaggcttcaaaacggccgtcattacgaaactgttcccaacccggtcgcacaccgtagcggcccagggtggaatcaacgcagctctggggaacatggaagaggacgactggaagtggcacatgtacgatacggtgaaagggtcggattggctgggagatcaagacgccatccactacatgacccgcgaagccccgaaggccgtcatcgagctggagaactacggtatgccgttttcgcgtacccctgacggtaaaatctaccagcgggcgttcggtggacagagcttgaagtacggaaaaggtggccaggctcatcgttgctgctgcgtggccgatcgaactggacattctctgttgcatacgttgtatggccaatcgttgagctacgattgcaactacttcatcgaatactttgccctggatttgctgatggaaaacggacagtgcgtcggagtgattgctctgaacttggaagacggtagtatccaccgtttccgatccaagaacaccgtgctggccactggaggatatggtcgtgcctacttctcgtgtacctcggctcacacctgtaccggcgatggaactgctatggttgctcgcgctggactgccttcggaggatttggaatttgttcagttccatccgactggaatctacggcgctggttgcctcatcactgaaggttgccgcggtgaaggtggttacctgatcaactcccaaggcgaacgctttatggaacgttatgctccggtggccaaggatttggcatcccgtgatgtcgtgtcccgttcgatgaccatcgaaatccgtgaaggtcgcggctgtcctgaaaaggaccatgtctacctgcagctgcaccatctgcccccagagcagctggcccagcgtctgcctggtatctccgaaactgctatgatctttgctggagtcgatgtgacccgtgaacctattcctgtcctaccaactgtgcattacaatatgggcggagtccccaccaactataagggccaagttctgaccgttgactccagcggtaacgatcacgttgttcccggattgtatgcttgcggagaatctgcatgctcgtcggttcatggcgctaacagactgggtgctaactccctgctggatttggttgtctttggtcgtgcctgtgccaagaccatcgctgcggagaatcgtcccggagaaaagattgccgacatcaagccgaacgccggtgaggcatcggttgccaacttggattgggttcgcaatgccaacggagctgttcctacctcgaccctgcgactgaacatgcagaagaccatgcagacccatgctgcggtgttccgcgaggagaagacactacaggagggtgtccgcaagatggccgacatctacaagaccatcaaggacgttaaggtttcggaccggtcgctggtgtggaactcggatctggtggaaacgttggaactgcagaacctgttgctgaacgccaacatgaccatcacggccgctgagaaccgaaaggaatcgcgtggtgctcatgcccgcgaggattacaagcaccgcgtggacgaatacgactacagcaaacccctggagggccagcagaagaagccagttgaagaacactggcgcaaacacacgctgacctggatcgatccggagacgggtgccgtcaagattgactaccgaccggtcattgatcagaccctgagcgaggaatgcaacaccgtgccaccggccatccgttcgtactaa

SEQ ID NO: 1114 - DNA, 2475 bp, Aedes aegypti
atgaaccacctgccaggatcgtctccgcggtcaccggcgccttcgcccgatccggatgtggacgacggtagcagcaagaagcaagccaccagggttttcaaaaagagctcctccaacggcaaaataacagtctacctaggaaaacgtgatttcgtggaccacataacgcacgtcgatcccatagatggcgtggtgctgatagatccggactacgtgaaagatcgtaaagtgttcggacacgtactggccgccttccgatacgggcgcgaagacttggacgtgctcgggctaacgttccgaaaagacttgtacctggcctccgaacagatcttcccaccgcaggaaacggaccgaccgctgacccggctccaggagcggctgatccgcaaactcggccccaatgcctacccgttctacttcgaagtgccgccacactgtcccgcctcggtgtccctgcagccggcacccggggacaccggcaaaccgtgcggtgtggactacgagctgaaggcctttgtcggcgaaacgcccgaggacaaaccgcacaagcggaattcggtacggttagcgattaggaaaattatgtacgccccctcgaagctgggcgagcagccatcgatcgaggtcagcaaggagtacatactgaaaccaaataaaatccacctggaggcgagtctggacaaggagctttatcaccacggcgaaagtttatcggtgaatgtacatatagcgaataattcgagtaaaacggttaagaaaatcaaagtgtctgtgcggcagttcgcggacatttgcctgttttcgacggcgcagtacaagtgcaccgtggcagaagtcgagtcagaacaagctacagtaaggatacaaacatctaaagccacaaccaatcaggaaccagtggtagaacttcaacccaggattagatccttgactttgatggacgtgattcggacggagcctcaactctcaggaagggacgagttagcaacggagctacccgggcggtggtctcgcaacatggtcgatggaaaatatagaatcgccgatccttcccagcgagagaacctcggcattatcgtgcagtataaagtgaaggttaagctgtgcattacaccgttgggcggtgacctggtggcagagttgccattcatcctgatgcacccgaaaccggacgacgacgaaccgctgatagggggagaacgatcgccaggccgaacgattggcaactcggacaagctgcatccgggagcgggaggggccggcggtggcgcgggaaccggtgccagtgacctgaacaagaacagcaccaaccggggcgacgccagtaaagaggacggccccaatctgatccaactggatggcaaaaaggctaaattggtaatcgaaacggatacgactcaattgtaacacactgacctggccccgattcaaaaccctgaaaccgatcgaaggaaaagaaagcgtaatagcgtaaacaacagccaccattccctttcaccaactatagctatgcgatgtgtgcagtttgtgctaaagctagttctcccatcctgcttcatcctgaccacccacacaaggaggatagctaggaaccacatcacacacaatgcgaggaatgcaggaatcgtcggatgaatcgactaaaacagcataaggcaaattgaatcgcggtgccgttgctcctgccagagataacgatgcatatccgccacaatgggggcggatggtctcttttgcacgaatgcagcagcaagcagtagcaccatccctattagggcggttcaaataattaaaaagtttgaaaattacatctcacatatcttctttacagttcttatgagaaaaatacaaatctgtgaaattttcagaattttaggattggaagttatggaggcctgaaaacgatgtttatagaaaaacagctacatatgaagaaatttcgaaaaatttatcatcgcaaattaaaaactcattctttaaaccaagcttattgtgagattaaaattcagtaatcatagcttgagtaatgaggttcgataattaatactagcatcatatagtagttttatcagcattaaaagttctaatactctagtttcctcatataaattttcataaaaaccttcaacagctttaggcaattttcaaatcctcaacaaagcagctaaaaatttgatagaaatctatttccttaaatatagtaaggaagatatgggaagttgaatgttcaaacttatttgcaagttgaaccaccctaaccatttccacccacacaaaatttgatcactttgaaaattacaccagttgatgcatctgcgtatactgcacttccctgctgttgactgtccttgcattggtattcgatgactataataatcacgttcgtccgtccactctcacgttccgtagctagatacgcattgcgcacattcaggattagtcttcgttgtctatattatgccatcaagggtacat

SEQ ID NO: 1115 - DNA, 5406 bp, Aedes aegypti
atgtcgcaggctctcccgattcgtttccaggagcatttgcagctcaccaacatcaacatcaatccgagctcaatctccttcaccaacctgactatggaatccgacaagtttatctgcgtccgagagaaaatcggcgaaacggcgcaagtcgtcattatcgatatgaacgatgcgcaaaatcccattcgtcggccgataagcgctgattcagctattatgaatcctgctagcaaggtcatcgctctcaaagctcaaaagactcttcaaatttttaacatcgagatgaaatcaaaaatgaaggcccacgcaatgaccgaggaggtcgtcttctggaagtggatcacgctgaacaccttgtccttggtgactgaaacttcggtttaccattggtccatggaaggagactcgaccccagtgaaaatgttcgaacgacactcatcgctgaatggatgccaaatcatcaactatagaaccgatcccaagcaggcttggcttcttctagttggtatttctgctcagcaaaaccgtgtgatcggggcaatgcaactatactcagtggaacgcaaagtgtcccaggcaatcgaaggtcacgcagcgtcgttcgcgacattcaagatggaagagaacaaggaaccatctacgttgttctgtttcgccgtacgttcggccaatgctgccaaactgcatatcattgaattggtgcaccccccaactggcaacactgctttcacgaagaaagccgtggatgtcttcttcccaccggaagcgcagagcgacttcccagtagcgatgcaagtttcgccaaaatacgacgtcatttacttgatcaccaaatatgggtacattcatatgtacgacatcgaaacaggcacatgtatctatatgaaccgtatttcggcggatacaattttcgtaacggccccacacgaatccagtggaggcataattggtgtcaatcgcaaaggtcaagtactgtccgtaacagttgatgaggaacagatcattccatacatcaatacggttctgcaaaatcccgaccttgctctgcgtatggctgtccgcaacaatctttccggcgcagaagatttgtttgttcgtaagttcaaccaactgttccaaaacggtcagtatgccgaagctgccaaggttgcagctattgctcccagaggaatccttcgtacccctcaaactatccaaaaattccaacaagttcccgcccaacctggaactaactctcctcctttgttgcaatacttcggtatcctgctcgatcaaggcaagctgaacaaatatgaatctcttgaactgtgtcgccctgttttggcccagggtcgtaagcaactgtgcgagaagtggctgaaagaggagaaactggagtgtagcgaagagctgggtgatctggtgaagccatcggatccaacattggccttgtccatctatctacgctcgaatgtcccgaataaggtcattcaatgcttcgcagagaccggccaattccagaagatagttctttatgcaaagaaagttaactacagcccggattatatcttcttgttacgctccgttatgcgtaccaatccggaacaaggcgctggattcgcaagtatgttggttgccgacgaagaacctctggccgacattaatcagatcgtagacatcttcatggagcaaaacatggttcagcagtgtaccgctttcctcttggatgctttgaaaaacaatcgtcccagcgaaggagcacttcaaacccgtctgttggaaatgaatttgatgtcggctcctcaggtggcagatgctattcttggtaacgctatgttcactcattacgatcgagcccacatcgcccagctatgcgagaaggccggattgttgcagcgtgctttggagcattatacggatttgtatgacattaagcgtgctgttgtccatacgcatctgttgaacggagattggctggttggattcttcggtacattgtcggttgaggattcgttggaatgtttgaaggcaatgctaactgccaacattcgccagaatttgcaaatctgtgtacaaattgcgaccaaatatcatgaacagctaactacaaaggcgttgattgacttgtttgagagcttcaagagctacgaaggattgttctacttccttggatcaattgtcaacttcagccaggatccggaagtgcacttcaagtatattcaagcagcatgcaagacgaaccaaattaaggaagtcgaacgtatttgccgcgagtccaattgctacaacgccgaacgtgttaagaacttcctcaaggaagctaagttgaccgatcaactcccgttgatcatcgtttgcgaccgtttcgattttgtccacgaccttgtactgtatctgtaccgcaacagtctgcagaaatatattgaaatttatgtgcaaaaggtgaatccatctcgactcccggtcgtcgtcggaggactgctggatgtcgactgttctgaggacatcatcaagaacctgatcctggtagtgaaaggtcaattctcaacagacgagcttgtagaagaagttgaaaagcgcaatcgtctcaagttgttgcttccgtggctggaatcccgtgtccacgagggttgtattgaaccggcaactcataatgccctggctaaaatctacatcgattcgaataataatccggaaaggtttttgaaggagaaccaattctacgacagccgtgtggtgggaagatactgcgaaaaacgcgatcctcatttggcttgcgttgcctacgaacgtggacattgtgaccgagagctgattgctgtgtgtaatgaaaactcgctcttcaaatccgaagccagatatctggttcgtcggcgtgatgcagaactgtgggccgatgtgctatcggaatcgaacccgtacaaacgtcaactaatcgatcaagtggtgcagactgctctttccgaaacacaggatccggatgacatctccgttactgtgaaagccttcatgaccgctgatttgccgaacgagttgattgaattgctggaaaaaattgtgttggattcttcggtgttctcggatcatcgcaatctacaaaatctgctcattctcacggcaatcaaagctgacagaagccgagtcatggattacattaaccgtttggacaattacgatgcacctgatattgccaacattgctatcaacaacgaactgtacgaggaagcgttcgcaattttcaagaaattcgatgtcaatacttctgctattcaggttttgatcgagcaggtgcacaatttggagagagcaaatgaattcgccgaacgctgcaatgaaccggcagtttggtcccaattggcgcgagcacaattacaacaaggcttggttaaggaagccatcgacagttacatcaaggccgatgatcctagcgcatatatggacgttgtagaaactgctagcaagaatgaatcgtgggaagatttggtacgctatctgcagatggcacgcaagaaggctcgtgaaagctatatcgaaagcgaattgatttatgcctacgctcggactggtcgtctggcagatttggaagaattcgtctccggaccgaatcatgctgatatccagaagatcggtgatcgttgtttcaatgataaaatgtacgaagccgccaaattgctctacaacaatgtcagcaatttcgccaggttggctatcactttggtgcatttgaaagagttccaaggagcggtggatggcgcgagaaaagccaattcgactcgtacgtggaaggaggtttgcttcgcttgtgttgatgccgaggaattccgattggctcagatgtgcggattgcacattgtggttcatgcggacgagctggaagatttgatcacttactatcaagatcgaggtcatttcgaagagttgattggactccttgaagcagcactcggtctggagcgcgcccatatgggcatgtttaccgagttggccatcctctactcgaaatacaaaccagctaaaatgcgtgaacacttggagctattctggtcacgtgttaacattcctaaagtacttcgcgccgcagaacaagctcatctctggtcggaattggtgttcttgtacgacaaatacgaggagtacgacaatgctgtactggcgatgatggctcaccctactgaagcatggagggaaggacacttcaaagacattattacaaaggtggccaacattgagctctactacaaggccattcagttctatctcgattacaagccgcttctgctgaacgatatgctcctcgtgctggcacctcgcatggaccatactcgttcggtaaacttcttcacaaagcaaggacatctacagttggttaagacataccttcgttccgtgcaaagcttaaacaacaaggcaatcaatgaagcactaaatggactcttaattgacgaagaggactatcagggcctcagaacttcgatcgacgcgttcgacaactttgacaacatcgctcttgctcagaaactggagaaacacgaactaacggaattcagacgaattgctgcttacttgtacaaaggaaacaatcgctggaagcagagtgtggaattgtgcaaaaaggaccgtctcttcaaagacgccatggaatatgcggccgagtcacatcaaggtgaattggcagaagagttgcttggttggttcctagaacgtggcgcgcacgattgtttcgcggcatgtttattccagtgctacgacctcctgcgcccagatatcatcttggagctggcatggcgtcacaatattatggactttgcgatgccctatttaatacaggtgacacgagaatacacatccaaggttgataagctggaagtggccgatgctgaacggcaaaaggaaggagagaactccgaacacaaatcaatcattctgcccgaaccccaactcatgttaaccgctggtccgggaatgggaatgccacaatacgccccgcaatatgccggaggttacgtgccggcgcaaccaaatatgtcaccatatccgggatatggtggtatgtaaaaacacaacccacacacacgttcgaacatgcatcgtagttctgaaatcgtagtttgactgtgctatcgatagacactaaaatcatttattttttgtcttcttaattacgactcgctcgctaacgtgcagcgttcagctaaggtgaacattactggagttttctgtacatctccaaaatttgataaacatttctcgaactggcacctcaattttggccagtttgcggtgagaagagagagttcagatttgatcaatggacaacgacaccttcgacataaacagacctcgtgcatcaagatggctatgcagtaaaaataatcaagtataattagacaattcatctttatgtttaatataatgtttgtttttctt

SEQ ID NO: 1116 - DNA, 4294 bp, Aedes aegypti
atggccgaggaccagggcaagcgccggagggacggttccctcgatgagctggtccaatatgttacgttgcacactccgaaccatgtcctgctgagtggaagtattctgccgtttatgatggtatacgtcctctggggctatctgtgggtttatgtgtacggcgtagaggaccattgggaggcgggattgctgacgctggccgggatcggattcgtgcagattctggtgtgcctctgctgcttctggagtgtccatgtgcaggtgttcctcaactgccggaaggcaaacagtcccgagaaggcaaaggtagttaaagtggtccccacggagaacaacggttcatcggagctggtgaaactccatcgcgccaaagcggacgaaaccgatgttgccagtggcgatggatcgatctactggttcctgttccagaagaccaaatacgtatgggacgcaaacaagaaacagttccgcagtgtcgagttccccatccacaagacgtacgaggagtacttcgaatccaaagggcaccaggaggacagcgacgtgcagctggcggagcggacctacggcaacaacaacatggagatggttgttccggagttcttcgagctgttcatcgaacgggcaacggctccgttctttgtgttccagatcttttcggtgctgctgtggtgcctggatcagtacatgtactattcgctgttcacgctggggatgctgatttcgttcgagtgcattctggtccagcagcagctgcggaacatgtccgaaatcaggaagatgggcaacagaccgtacatgatcaacgtgttccgcaaccggaaatggcgcccgatcaagtccaatctgttggttccgggagatttggtgtcgattacgcggtctcaggacgaaaacttggtaccatgcgatctgctgctgataagagggacttgcatcgtggatgagagtatgctgacaggtgaatccgttccgcagatgaaggaatcactggagaacaccgacgagcacaagaaggaactggacatcgaggcggacggaaaactgtatgttctattcggtggcaccaaagtggtccaacattcctcgccgagtaagggagcaatgcgagccccggacagcggttgtatcggatatgtcctccgaaccggattcaacacctcgcaaggaaagctgctgcggacgatcttgttcggcgtgaaacgagttacggagaacaatctggaaacgtttgcatttatcttgttcttaatggtattcgcggttgcggctgcggtgtacgtgtggatcaagggctccgaagatccggaacgaaaccggtacaagctcttcctggagtgtacgttgatcttgacatcgatcatcccaccggatctaccaatcgaactgtcgctggctgtgaacacctcgctactgcagctttccaagttgtacgtcttctgtacggaaccgttccggataccgttcgctggaaaggtacaaatttgctgcttcgataagactggaacgttgactagtgataacttggtagtggaaggagtggcgggtttgaagaaggacacgagtattacggcaatcaacgaaattccggaagctacggctcacgttttggggtcttgccattcgttggtacagttagatgatgggttggttggggatccacttgagaaagcgacacttacagctatcgattggaacttaaccaagggtgattcggtggttcccaagcgaggaaagttcaaacctctacgtatctatcaccgattccacttttcctcctcgctgaaaaggatgtctgtcttggcaggacatctcgttccgttcagcaacgagacgtgctatattggcacagttaagggagctcctgaggtggtgatgaagatgttaaagacagttccggagaactacgaagaaacgtatctggaatactctcgacgtggtgcacgtgttctagcactggggtacaagtccttcggggcactcgataacgccacggtccgcgaactgaaacgtgccgatgttgaaaaggacctggaatttgccggattcatcatcatttcctgcccactgaagccagattcaaagtacgccatcaaggaaattattcaagcttctcacaaagtgatgatgatcaccggtgataatccgctgaccgcttgtcacgtagcgaaggaacttcgattcaccaagcgaacgatcgttgttcttacgagagacgacacggatgattcctggtactgggaatcgatcaatcgggaagtgaggatccccctcgtagaaaatcgaacggttaaggaactgtacaaggaacacgatttctgcatcaccggcgaaggacttcaatatctggacagcgagaagcattcgtacttgctgaagctgatgccatacgtcacggtgttcgcaagattcgctccaaaacaaaaggaagtggtcataaccaccctgaagcagctagggtttcacacgttgatgtgcggtgacggaacgaacgatgtcggagccctgaagcacgcaaatgttggcgtttcgctgctgagtcatccgccgaccaagtccgagaagcgtcacttgcgagccgtgacgacacccgatggggaagtggaaaagaagaaagacaccgcgaaggatgaacggaaagcactgactccgagggaacgggccatcatgaagcatcgggacaatttgagttccactcaggagaggctgcagaaggttctgaaggagatggacgacgagcaggtgcaggttgtgaagctgggtgatgccagtattgcggcgccgttcaccagccgatcgtcgtcgatcaattgcgtgtgtcacatcatcaaacagggccgctgtacgctggtcacaacgctccagatgttcaagatcctagccttgaacgcgctcatttctgcctactgtcaatcggtcttgtacatcgatggcgtcaagaacagcgacacccagcttacgttgcacggtttgctgacggcagcatgtttcctcttcattacccgctcgaaacccctcaaggtcctgtccaagcaagcgccactgccgaacatcttcaatctgtactcggtgacaacgatcctcgcccagtttgccgttcacttcacggcactggtctatctcgtgcacgaggccaacttgcgatcgccacctagggaaggcaaagtaaagctcaatctggatctggaaccggacgagaaggaggagttcgtaccgaacatcgtcaacagtacggtgtacatcatcagcgtgacgatgcagatcgcaacggtggccgtcaactacaagggccatccgttcatggagagcatgcgggagaaccgactgctgtcgtatgccatcttcacgtccagtgcgatcgtgctgtgcctggcgctgggcattgtgccggatctgttgaccaccttcgaagtgatagatttcgaagcggatttccgaaagattttggtcggcgtcctggtggcggacatgctgctcgcctatctggtcgaccgggtttgctcgttcctgttcggcgagatgcgaaagaagacggacatcattgcctagaccccctggggaagcaggaggagcgcatcctgggagatccagtgcaacacaacaactaaggtatccttagcgtcgcggcacacattaaaacctattataatattagagcaaattatgcacgaagcgcagcgcgaacacttgtgagaacagggcaatggttattttaactatattattgtgaatctacgattagagtgaccatcaggcaggttaagcgtgtgatagagtatttcatttttttttctgaatcgagaacttcaaaacgatacgaacagaaatccgaaaaagaaggtcgggtgttttctgttccgttcaatgaagggttggtatattagtgggattgatgttgatgttggaattaatatagtaaagaatttggactagcaaaggcagcagttatcgtcgagttgcatctagactaccggatagtagagagagaggtaatttcttctttatgcgaagaacacacgatgatgaaagtgagtttgtgttaggatgtccataatgctgagagaaacgtaaaatgccgcaagggaacctagatgaaataattcaataaaataaaatgaataagcagggaacgaattggaaagcaaccattgaaatctgttcatagcaaaaaaaacgtttacttgacttatacactttatataactgtcttacgaagttttttagttgagggtaacgttgtatggttcgtcgtatggagaaaacaaaaacctttaaaatataaaacgatatattt

SEQ ID NO: 1117 - DNA, 3310 bp, Aedes aegypti
tcatgattggcggcacaatttgctttctttttttactttttcgcttaacccgctgttcctctgcttttgccactttgtttgtaccactccttgttaagtcaagtataagatactaacaatcatttcttggtggaaatttttacatctctcactgtttggcacgcttcatcaaattactcattttgtcttcgactagtgccaatcacgtcctacacctttgtggtcacagattcgtagatatgaacccacgagctgtagacatctcactccccgtatctacagtttacattattataaacgatgacctaatgatacccaccattctatgtagaacccgtggatgtcctttttacggtttttcgtctacggatagtagcgcggctgtttgtagattttgtgggtttcgattaagtcgaaattgtaacctacctaattttttgttgtgttatctgaggttcacccgtagactgaggttgaccaatggtttaacctgtaggtacttctcacatcgctaccacaacagagtaatataatgataaacgtaatctgagtcaatactcgacgcatatgtagacactcattgatttggatccgttatcatactattcacaactgatagacggaaagtactgcattcgcacatgttaagtgctgattattcgcttcaacaataccagcgaacgaacaagtggcggtatgagttttcattctggaacacaaatgaaactcgcagcatatacaatactggaatgagcacttgacgatctcccgacgtctagattaattggcagttgaataacacttctcgaagaccccactcgggagaggaaaccccatcagttgattggtgactcgtgtggacagttgtcatccattttggatcgggagtgctgttagtggatggaattttcttgggcgttgaaggattggctcggaccatgtgttagataaaagtttcgctgaagctgtttatctcaattttactattgatttaagttgtgcggtgacttggtgaggattaagtggcgtcaggatgaccgataaaagcaaaacgactgatagtgatatagcatgcgaggaagcgtccaggttaacggccgatctacaggacgaggcgtcacctgaggatgacgatggaatgtgtgaataccatgatatgccgccaccaccggatggcggctacggatgggtgattgtgtttgcgtcgtttatgtgtaacatgatagtggacggtattgcgtataccttcggtgtgttcctgaatgatttcgtggagtactttggcgaaggcaagggtacggttgcgtgggtgggtagtttacttagtggaatgtacttaagtgctggtccagtggtgtctgccctggcgaacaaatatggctgccgggcagtctgtatagctggtagtgtaatctcctgcgtggcatttgctctcagtaccttaagcccaaatgtgaccgtgatgatgctgacctacggcgttatgggcggtatcggattcgggttcatctatctgcctgccgtcgttgccgtcggatattactttgaaacgaaacgttccttggcgacgggcatcgctgtctgtggctccggagtgggaacttttgttttcgctcccctggccaacatgctgctggcgaatttcgactggaaaaattccactctcatattagctggtctaatattgaactgcgcaattttcggtgctatgatgagacccctcacctatccaaaggaagacaaagtcaagcctttaatgcagcgaatgtacgaggaaaaacgtatgcaaatggagcgtggttcaatcggtggttcctatttcatggtgcagttaccggacggtacgatggaaaaaagactgaaggctcctctgaatgccgatccgggcgtacactcgagcttggctctggatcagctggctgcacaacagggtatgacagcggtggccactttgcctaccatcacggaagccaaggttcaagagcagaacggcaactccagcaattcttcatccgagtccggccagatcgagatcaagaaaccactgcagaggaagcgtaccgccaactccgagtccgatgccaacgaatataactctaacaacatgccgcgcaatgcttcgcaacctgctttcaccagtaatcagtcgggtattccaaagaacggatccgtgccaacttttgaccgtgtccgtaagcactcgacaggtgaaagatttaagccatccttagctgcaattaaagcaagctctagaggtgatgttggtagtaacggagatgtacgtaaaactatgcatttaaaacttgtcatgtacacgtcgaaggcctccctgaaggcggatcgtccgcaaatggtgcgcccgctgtcacgtaaggatatcttctactcgggatccgttaccaacctgaaggagttccagtcgcagaagtcgctcgccagctatcgcaactccgtcatttcgttgaccaaattcgaacgcgagcacaggggtgacgttgtccgtgaagatttggagaaaggggcggaacagtacgatctgtgtccgtgcctggtgcttcccgaatccttcaagaatgctattggggctatgatggatgtgagcttactgcgggatcctgtattcatgatgattgccatttcgaacatttttggcatggcggggttgtacgttcctttcgtgtacttagtggacgcagctgttcttgatggaattgaggaaagcaaagccacgttcctgatttcgatcatcggtattaccaacaccttcgctaggattttgtgcggttacgttgccgatttcccgaaagtggacgccttgtttatgaacaatatttgccttgtgatctctacgtttgccgtatcgctgacaccgttctgtcatagttactacgcatatgttgcgatggcaattgcatttggaatagcagttgctggctacatctcgttgacgtcaattattctggttgatctgctgggcttggataagctgacgaatgccttcggtttgctgattttgttcagaggagctgccaccatcgttgggtcaccactggctggagcactgtacgacgcgacgcagacctattcgattccgttcttcgttgccggaggtctgttcggtctgtcggcgattttcagctttgctgcaccagcaactaagagattccgcaaacaagaggaagcgccggtccacgtggaggtgctgaccccgatcgatgaggaaccatcggaagacctggccgacgatgaccagcccatcacaatactaccaaagattgtccaaaccgcaccgagtccatccacggaacaa

SEQ ID NO: 1118 - DNA, 6551 bp, Aedes aegypti
gaaaaaaaataatcgaaaaataataaagaaataaaagtcacataattgaactacccatcaattcaattttaaatttcgaagagtttacatctgtaaaacaccttatgtgccagtctgtcacgctatagggggcaccgattcaccatcgtagctaatcacaaacatcgagctgccgcgccggttgttcttacattacattgctacgtatgtgaaccacgacgcgcacgcagagagaaccgacgaatactcaaagctaagcgattggcagtgacattcagttattcgctggaacttgccgcgaacggttcaatccctcgattcgtccattcccccaaaagtgtaagtacaatatagcaattcaagccttataaccggcgatctacaattcggttgacccaaaggaaacaacgccgaccacgagaggaaattcaaatttcaaagttcgaaaacggggaatacatattcaaggggagcattaattggtggaacacgcagaacagcgccagaagataactactaagtaaggactgagaatgcggctgagcggatgattttcagcagcatctagacttgattgattcgctagtagtatattacgtaatcggtcaattgcatcgccggcgaatgtaaatatagaagcccgacatcgtttcagtaggttgattgaagtgattcggagtgattattatttttaattagtgacgacccttaatggaatgacccgtttgtagggtacggaattttatagaacggaccataaatcgcgttctattcagcatgttcataaaagtgtgaccctggtggatgaagatagcgagttaaccgtgcgaactggaaaagaggcaaatgagagtcgaaacaggttgtttagtgactgttttttttttggaagaagagaccaataaaatgagaatgagttgagatttgaggaatggtgacgtgatgctgttcatttgaccaaaaccggattctcttaatttggtgcaagtcacaagccgcgaattccgagcacgagtttatgattctgaaggcgtgtgtacaccttacaaaacccaaaaataagcggcttactgtttgtatacacaaccgaatgcgttgggattggtgctgtcgacacacacttgttgctgctcagccgaaggaatccgaacagcaagcagccactcagccgagaagagtgacgcatcgtaatcggcagcaaagatggaagcccatccgatggacgagttttgcggttcccgattttgggacctaaatctaacctggtatacggaggatccggatttgacaccgtgtttccaacagaccgtgctcgtgtgggcgccctgcgctttcctctgggttttctcgctgatcgagctgttttacctgcggaacagtcgtaaccgcaatgttccctggagcgtgttgaatatcacaaaactagctatcgttagcgcgctaattgtgctaaccattgtcgatctaatcaaagcaatctcaacagacggtacggtggcgccggtctacttttacaccccggtgataaaaattgccactttcgcttatgttgccggtctaatatatttaaacaagttctacggaatgcgaacatccggcttgatgttcctcttctggggtctcttggttatctgcagcattccgcgctgtcgaacggagtctcgtgcccaccaactgcgccaagaaactgactcgtgggcagactatcattttgtcagtttcttcattttcttcgccggttcgtgcctgatgttcctcacgaacttcctcatcgacaaaccgccccagcaaacaaaatacgaaataacagataaggattgtcctgaactgtcagctactttcccgtcgcgactggttttcgggtggttcgacaaactggcctggacaggattcaaaaaacccctggtaaacgaagatctctggaatatgaaaccagaggatgcttctaaagaagtgtctcctctattcatgaaatattggaacgaaactctggagaaaacgtataaaactcgagaggtgcacgacgtaacaagtactgctagtttcaaaaagcaatcggctcgtgtagatttcaagacgatcaagacgaaaaaaattgcgtcaattctaccggctctaattaaagcttttggtcctacatttgcttttggatcatttttgaaactagggcaagatgtgttgacttttgcatctcctcaaatcctgaggctcatcatcaatttcgttggcggcgaggaacccctgtggaaaggcattttctttgcacttttactgtttttggtagccggaacgcaaacactatttttggcacaatacttcaaccggatgttcttcgtcggattgcgaatccgtacggcgctgatcagtgccatctaccgaaaggcattgatcatttcaaacagcgcacgaaaaggttcgaccgtgggtgaaatcgttaacctgatggcggtcgatgctcaaagattcatggatctgaccacctatattaacatgctgtggagtgctccgctgcagattggcttggcgctgtttttcctgtgggaaattctgggaccgtccgtgctagctggactggcagtgatgattatcctgattcccgtcaacggtgtcattgccaataaaatcaaaacgctgcaaattaagcaaatgaagaacaaagacgaacgtgtcaaactgatgaacgaagtgctcagcggtatcaaggtcctgaaactatacgcttgggaaccaagttttgagcagcaaattctgaaaattcgtgacaaggaagtcaaagttctcaagtcggctgcttatctgaatgctggaacatcattcatctggtcatgcgctcctttcctggtttcccttatcacattttccgtgtatgtactgtccgacgagaaaaacgtgctgacccccgtgaaagcattcgtttgcctcacgctgttcgatatccttaaacttcctctggtgctcttacccatgttgatcgtgtacatggtagagaccagcgtttctgtgaaacgtatcaacaagttcctgaaccaagaagaacttgatccagacaacgttacacacgacgagaaagaatcttgtccgctggtaattgaagatggtgtgttctcatggggtgaagaagaaaccaccttgcgtaacataaacattaaggtgcagaagaatgaactggcggctatcgtgggtaccgttggatccggtaaaagttcggtactgtctgcattccttggtgaaatggacaaaatttccggacgggtcaatacgataggaaaaatagcctacgtcagtcagcaggcctggatccagaacgctactctgcaggataatatcctgttcggtaaaccgatggataccaagttgtacaataaggtcatctcggcatgtgcattgaaacccgatattgaaatgttgcctggtggcgatcagactgaaatcggagaaaaggggatcaacctgtccggtggacagaaacaacgtgtttctttagcccgagctgtatatagcgatgcagatatatacttcttggacgatccgttgagtgccgtagattctcacgttggaaagcacatattcgaacaggtcatcggagaaaacggattgctagcgaagaaaactcgcgtactggtaacgcatggtattacttacttgccgaatacaaatgtgatatacgtcatgaaggacggagaaatttcggaatctggctcttaccaggagctgatggaaaagaaaggagcgtttgcagacttcctgattcaacatctacaggaagtaaacgaagaagaggaggacattgatgagataaaagcccaactggaatctaacgttagcaacgaggaactaaaacacaaatttgaacgtgccatcagcaaacgatcacgaagcggcagcacgtcatctggaaatgaatcgttctccaggcaaaactctgaaataagtggaagccaaactagtttgagacgacgaactcccgaaaagaaacttccagaagagccacagaagaacaagttgatcgaacaggaaaaatccgaaacgggaagcgtgaaatgggaagtctacaaacattatctgaaaagcattggcctaacgctttcagtggctacagtttttctgaatatgatattccaaggtttttcgataggatctaacctatggctgtccagatggtcgacagatgaatcagccgaaaatgataccagtgttagagatatgtacttgggagtgtatggtgctttcggtgctggacaagtgttggccacctttgccgcttcgatatcattcgcactgggtgcgctcaaggcatccagagaaatgcacatccttctattgcgatacgtactgcgttggccgatggagctgttcgatacgacacccttggggcgagtgttgaaccggttcgccaaggatgtggacgtcatcgataacacattgccccaggtggtgcggtcgtgtctcgtgatgatttttgcggtggtagccacgttggtggtcatcagtatctcgacgccaatttttgccaccgtaatcctgccgatcggtatcctgtactatgccgtgcaacgcttctacgtggccacatcgcggcaattgaagcgtctggaatcggtgtcccgttcgccaatctactcgcactttggtgaatcaatccagggagcacaaaccattcgtgcctacggtgttcaggatcggttcattgtcgaatcggaatctcgcgtagacttcaaccaggtctgctacttccctagtatcatcgccaatcggtggctggccgttcgtttggagatggtcggaaatttaatcattctgtttgccgctctgtttgctgtgctcggacgagaaacaatgaacccaggtttagtgggtttgtcagtttcgtatgcattgcaaatcactcaaactttaaattggttggttcggatgacatcggatgttgagacgaacatcgtagcagtggaacgtattaaagagtatggagagacgaagcaagaagccgcgtgggaacttccgaacagcaacttgccacgagactggccggaacagggccgtgtagagttccaagacttccaggtgcgatatcgggaaggactcgatttggtcctgaaaggcatctcttttgcagtagacggcggtgagaaagttggaatcgtcggtcgcactggtgctggaaagtctagcttgacgttggctttattccgaattattgagtctgccggtggaaagatcgtaattgatgggcaagacatttctaagctcggtctgcatgccttgagatctcgattgacgatcattccacaagatccagttctcttctcgggaacgatgcgaattaatctggatcctttcaatgtgcatagcgatgaagatatctggaaagcattggaacatgctcatctgaaatctttcgtgaaaggtctaacggctggtatcaatcacgaggtcagtgaaggcggagaaaatctgtccgttggccagcggcagttgatttgcctggcgcgagcattgctgcggaaaactaaagtacttattctggacgaagctactgctgctgttgatctggaaactgatgatctaattcagagaaccattcgcaccgaattcaaggactgtacggtgctgacgatagcccatcgtctcaacactattatggattatgataaagtgatcattctagataagggtcaaatctctgagttcgcttcaccaagtgaactccttcagaacaaatcgtcggctttctatagcatggccaaggatgctggattagtgaaatatcactattaacttacgggaactccgaagaagactgcctcttgttaaatattaaggtcaagttattcaataaatacaacattgatgtacgatcagttcattcctattatgtttatattttcaaaacttcttctcaatttacctgattcttctgctgcgcttaacacattacataactagggagatttacgatatcggtagcccgagttttctcggttatgaaactgatcaattacagatttgttcagaataatcgtagtaaaagccgattttcattcaaaatactcaaatttggcatgattcaatgattttttacaattatttattacaaactattacaattttggaaacacctgctgaaaagtttagcatcaagtaaaattactcaaagtaatagtagttttaataattcaaattactatttcagattggtattatttttgctcatcatttgcacatgtttacctaagttagaaatgttttaacaagtcaattaaaaaaatgtatttggatttttttttcaaatagatcgccgtctatttataacgtaaggtttaatgggggaggggtttgtatagtacctataacaaaagatatccgattgaaaagcttgtgagtttttttttcgtaacaaaacgcaggaatcaccatttttctgttttgatgctgccacgtagaggaagaacataaaactaccattttaaatgtggtattactaccttctcatggatcttatatcgatctgtttcttttaaaagtttttgataactttccgcaggatggccacc

SEQ ID NO: 1119 - DNA, 5431 bp, Aedes aegypti
ctaaacaaaagaatttaaaaaatgtaaagcttccactaccggattcaaaactcggttcggttaaccctagacagtgccgcggatgtatgtatcgaaggaaaattaattgctctacaaatgcgaacgcgttgctgctgtctttgtcgtcgcggcgttgttggttgcgcgagtgttgttacgaatggcgggtgaagtcagcagtcgattgcccgaaccctcacgcttaaactaaaacatcgccaataacaaccaacaacgaatgcgaatatacacgcctgatgtgttgtttgatgcgacgacagctagccgagaagggtattggtttgtttctcccgaaatgactgttcaatacgtcccaagagcttgtccgattcggttcaacggaagcatccctccgcggtggaactctcaagcaactcatcagttttccaccatcatacgagaaaagcagacagtgaagacgacaggagaagattgcttgcacccgcttagaaagggggtggtgactgttcatttcacgcagaacaaagttgtcgaaaagattactggcgtggaaaaccaggtgaagtgattgtatacggtgaccttaggaagctacgtttcctgaaatggtgctattttaactcaaatctaagtgtgatttttatactaaagtgtatgatctttaatgttcttgctcaccgtggagtagtgttgcacattttggaaactttttaaatgggttttgagtgtttataaaaaggagcccatttcaaaatttcaaacttactaaactttacgtaagagcacaaagcaccgctaaaaacccacaataaacttgattgtatcacacagttagtcattttgacgtagtgcagaccagtatcatttgtgtggaaattcgtcttagtgacagtgttattacataaaggatagatgtaaagcgtcacatccgcggagaaacgaggccatttgcggaggtcgagtcaatgaaatcgaggatttagttcagtgaaaaatcattgagtgagtgtatctttcaaaagaggaaaaaaaatctgcgttctggtttcctttcccacaaagagaacaaaagaacaaaataccacgaaatccatcagacgacgaagaaaaattacttatttaccagcagcgaaggaacaactgcggctgttttgttgatacagaacgagagctgtagaacacaaagtgattcacgacgtcagctgtctgcctcccgttttggtggcgtgtgtatattgcggcggtcggtactcgaagattattgacctccacggataccagtgcatgtagtaaaacgcggaaaagctcggatatatagtgactagcgcgctgggaactattcaacctatcaattagcagtgatatcaacccatcagcggttcgttgctcaccagcagggatccggattgatttacaactgtcagccccaaggtttttccgatgtggctgcaatagatagtccagggcatcacttctatcagagtgtgactaacttgttcaagcctaaatataaaaagcacgcacactacttatggttgactgcgtgatactggcacggagacggacttcggacgtggacgaggacgccgacgacgagtggatttggccttcgtcgggcgcaaaactgtcgatggtggtgacgcgaaattgattctatgaggaacgccgaagctccaccaatttcgacggttgattgacaacagaaagacccacgcaacagtcatcgccactcatccacaatgggcgaggaaagcgtcgagtgtaacgagggcaagctgatcacaaagaacggtggatacagtcccgtcaagcagctggaaaatggcgatctggttaggaatgatagccagaaaaagatagtccaattcgacaaggcaacgaatggcaacaatcataataatgtgaacacccgtgcctcttaccccgaaaaaagcgatgaaaaatcaatgcacaatggagttgcatccgccggcggagatcactccgaaattaggactgatgaggatcccgacgattatgaaatggttccacccgatggtggatggggctggctcgtgctggctggctcaatgttagttaacattcttgtacctggcacaattaaaagctttggcgtactatttgtggaatttctcgaagcattccaagcctcaccatcgaccgccgcatggattccagcattgtgttacttcttgtacagctcactaggtcccctgtccagcatactttcagtcaagtacagctaccgtacagttaccattatcggtggaacgtttgcagccgttggaatgatcattacgtattgggcgacttcggttagttttctgtacataagttatggagtactggtgggaactggagctggactctcatttcctccaacggtctacatcgtcacatcgtacttcgtgaagctaagaggtttggcgaatggattgtgtatttctggcagtgcattgggttcgattattttgccacccgtattgagatatttgctggtgaactttggatacagaggcgcttgtttaatcatgggtggtatcactttgaatgtatgggttgctgcaatattttaccaacctgtagagaaccatatgaaaagagtaaaaaagaccaaagatatagaagaagagttagttggtaatgatacgattatggaagagtcggaaaccaacgatgatctagaagagggtctgaacattgaaaaatctgcaatgaaaccaaagtttatgatcacaggcgacgacacaccagttgctacgccgactctagagcacaagtctccggacattttccgtttcaatcccaagcatggacttattgatagttttgctagaagtgtatcggctgcagcagtaccagcttcttaccataaagaagaccacggccatagacaccggaagatcagtactcccataaaagaggagcatcgaaaccttacttttactactcctctaaacgaatcacagggatcacatttccgattgaatagactgaactctatgcgcagtggacaaagacctccaagacgatctccatctaccagcagcttccaatacatcagtacaccataccacggaagcactctatctgctctacagcctaaagaatttgcctctcatctgtcgctgagatcgattgcggacagtttcaagcctgcatccaaacatacaggggacaaatcagacaaatctacggatggtcagaaatactttgacctatcattgcttcgagacccgtcgtatcttgtaatactcatatccaactcaaccaacgccattggttacactaattttataattttgttacccgcatacgcaatctcattaggattcgataaaagtctcgcagcctatctgttatcgattgtttcgacattggatctggtggggcgtattggaggatccgctctgtcagatacaaacctcattcccaaaacgtggtactttgtcggcggtctctcgatttcagggttggctttggccgttcttccgttagcaagctcgtataccatggttagcgttttttgcgctctatttggtttagcatctgggacgtatgttggtattactgcagttatcatggcagatatgttgggaaccgaacggctcacatcatcctatggtatcagcttgtttgttaacggaattctacaattagttggacctccaatttgtgggcttatattcgaacatattggtgattatcgacccctgttcactgcacttggttttatcctactggtaggttcctcactatggggatttatgccttttatacacagaaataaacttcgcaaacaacaaaaagcagctgaagctcaacaagatgtagagaaaagtcttatagcttaaaatgtagcatgatactaaaaggatcaatcggggaatgaaaattaactatttcattcttctaggtagatactgacaatgattacttataaagaatatggacaacaaccagatcattcattgcattgctcgaacatggttttacgggttgcactgttaaatcaaatgaacctgtggattttacttttaatgtaattttcacgcccaaaacaaattctgtattaaacatttacctatatatggataaaatcaaatgtttaaatacaaacatatataaaatacttacattttatgaattacaatctaatgacttatcatacatttcttgcagaattagtaagcattgtgctaaaattttgcagtcgctggttggatacatattcaaattatgtttgctcctttttgattttactaggaacgatataaactatcgtttagttttatatccaatggaagctgcttctgttggttgtctgttatctttataagttattcaatacctactgataaaatgtgcagaaaacaatctatacaagattttaatcctcgattctgtagtacgcgaatcgatgatgatcgtgatatgacaattcaaaactgatttctttcatgatatgcaggaaatttaaaaacaaagtattttagtgcacatgagctacaaccaaacggtgcaaaaccgttgcttacgatgaagcgtaatacgcaaggtactattattaagctggtagttggaacaaaaaatgagaaaggagaacaatatgagtattatatttttaggtattttacaaattgcgtgagctgaaatccaaactgcgtgagttgttttttttttgtgtatgaatgattaggttagatagtgtaaatctaccataaaacctttgagatccctatacgaatgatctggggagggggatttaacttgaaacgtagtttaatgaatcctcaagtgaatgcatgtttgaaatcaattttatttgtgtagtgtttgaactctagttctaagtcttagaaattatgactacaggagaaagaaccatttcaaatatttattctacttttacagtagttctttcgcttaaggggaaaatatcaagaatatcatattcagaatattatgttactcgagaggtagaatacagcatttggaatggacaacaataaatggaaaataaaacaattataactattaatgtaattcataatcatccgaactccaaagtggtatcggccatatgccgattagcatcatcctgccaatctattttgtatttgtccaagaagctctccaaaagttccttcaataattacaagtttatgtcaaataacattttacaagaatttcacgatttctttaagaatcacttcgctgatgctgtatcggacaatacatttgcaactttttagattttccatacaacatcatcaactttgaccagatggatcttagttatttatgaacaaattttcacagcgtattagacataacttgaattttaataaaaaaaatttggttgattttcagccacgagtttagaagtaataccggttggactaaagggaaattcccgtaacgcggg

SEQ ID NO: 1120 - DNA, 3360 bp, Aedes aegypti
cagtttcgttactgattacaaagtgccaaataaaatcattttaaaagtgtgttaaaatgtacaaaacgtttcaattacaacagaattgtttagttatgacgtattataatagtttgagaatggttttctgaaaagtttaagattataagcatcttatttgtcattatgaaaaacaaatgaaaaaggtgtggcatgcgtagttttcaattagagcacatacagtagaaaattaaatatgaaaacttattattggaatttttacagtataaaacactccattttacaaaaaataacagttttattattcattgaggtcaattgcttaaaaataggcttgtcatatatatatatatatatatgaaatctagaaatggagcgcaaagtgttatctttgctctgcctcttttttattaacgtctctgcacaacggccagggggagattatccatcgtttttcaacattggaggagtattaagcaacaatgacagcgaaacccatttctcgttggttattgcccatctgaacttcgatcaaacatatgtaccaagaggcgtcacatattacgataaaacgattagaatcgataagaacccaataaaaactgctttggacgtatgcaaacatttaatttcacgaagggtatacgctgttgtagtatcacatgaaccaaccggggatctttcgcctgctgccgttagttatactaatgggttttatcaaataccaatcattggaatttcatctcgggatgcagcattttcggataaaaacatacacgtttcatttttgcgaacagtgccgcctttctaccatcaagctgatgtgtggcttgaaatgttaagccatttcggatatacgaaggtgatcgttattcatagctccgacacagatggaagggcaatacttggacgatttcagaccacatcacaaactaactatgatgacatagacgttcgtgctactgtcgagagcataatagaattcgaacccaagcttgaaacgtttacagaaaatttgatggagatgaaaacagcgcaatcaagagtgtatttgctgtatgccagtactgaggattcatatgttatctttcgtgatgcagcgcagaacaatatgacggaaaccggacatatttggattgtcacagaacaggcacttcaagcaaataatacaccgattggtgtacttggactaaaactaaacaactcaaatagtgaaaatgaacatataaaggacgcaatatatgtcttagcatcagcgattaaggaaatgataacccataacgagaccattactgaagcacctaaagattgtgatgatacaggtgccgtttgggaatccgggaaaaagatgttcaactacttaaaaacaagacacataaaaggagaaacgggacatgtggcattcgatagcaatggagatagaatatatgctgcatatgaagttattaacgttcagcaaccaatgttatcgtctacgcggaagaatgttaaggttggaagtttcttctatgatgaagagaaaggccgaatgaggctgaaaataaatgatactatgctggtttggcctggaaacaccgaaaaaaagccggaaggaataatgattcctactcatttgaaagttcttaccattgaagagaaaccatttgtgtatgtacgaaaattactagatgacgaaattgattgtgaagatgatgaaatagcatgtccccattttaattctactgatggaaacgaaaaagactattgctgcaagggatactgcatagatttgttgaaagcattagcgcaaaggataaactttacttacgatttagccctatcgcctgatgggcaatttggtcactatcaacttaaaaatcatactacgggcatcggcacaagtgtcaaaaaggaatggaacgggcttattggtgagctcgtcgccgagagagcagatcttatagttgctccgttgactatcaatccggaaagagcggagtttattgaattttcaaaaccattcaaataccagggcattactatattggaaaagaagccgtcaagatcaagcacactggtatcatttttgcaaccattcagtaatactctgtggatattagtaatggtgtcggtacacgtcgtagcactggttctctaccttttggatagattttcaccttttggacgattcaaactgactaccaatgatggaacggaagaagatgcgctaaatctgagttctgcgatttggtttgcttggggagtcttgctgaatagcggaattggcgaaggaactccacgaagcttttcagcgcgagtactaggtatggtatgggctggatttgctatgataattgtggcatcttatactgctaatctggctgcttttcttgtgttggagcgaccgaaaacaaaattatctggcataaatgatgcacgccttcgtaatacgatggaaaatttaacttgtgcgaccgttaagggatctgctgtggacatgtattttcgaagacaagttgaactatctaacatgtaccgtacaatggaagcaaacaattatgacaccgctgaacaagcaattcaagacgttaaagacgggaagcttatggcgtttatttgggattcatctcgtttagaatacgaagctgccaaagattgtgaactggtaactgctggcgagttgtttggacgaagtggttatggtattggtttacaaaagggttcgccatggacggatgctgttacgttagcaatattggattttcatgaaagcggatttatggaatcacttgataaagaatggattttccacggaaatattcaacagtgtgagcaattcgaaaaaacaccaaacacattgggtttgaaaaatatggcgggtgtatttattctggtcggcgcaggcattgttggtggtatagggttgattataatcgaagttatttataaaaagcatcaaataaagaaacaaaagaaactggaaatagctcgccatgcagccgacaagtggagaggaactattgagaaacgaaaaaccttgagagcatctctagcaatgcaacgacagtacaatgtaggattaaattcggtttccaaatccatcagtcaggcagtagacaaaaatcgaaatccaaaactcaatcccttatcgagagctccagaaagagcatggcctggagatcacgaaattgcgcgcaatcgtagaaataatgatcaaacatacaaaccacctcctagatacatgcccacatatgctacagatgtatcacatttagtggtataaataaaataattaacgaatactatattactaaacatattaatgtattttacctccttaaatatataaatgttaatactgtgtttagattcacataatcc

SEQ ID NO: 1121 - DNA, 1643 bp, Aedes aegypti
atgagtaacaatggaccgggggttacaaaccccatgctgtacgatcctccggagggacaggcctccaatacgaagctgatgcagtttgtagctggcgttggagtgtccatcgccgccatcagtgccggaaccgccctcggatggacttcaccagttctgccgcagctggcacttgctgaaacaggaaacgattccacgacggcaaccgccagcagtaacaacaccgatgccggttcgggtttctatctcacagctgaccaaggttcatgggtcggagcgttcctggcggtgggtgctttctgtggtgcccttcctgctggatacctggcggagaagatcggtcgcaagtacaccaccatgtctctggccctgccctatctggccagttgggccctgattatctttgccagtggagcggagatgctttacgccggacgattcgtgattggtattgccactggagcttcctgtgtggtggccccgatgttcatctccgagattgccgagacttcgattcgtggtgcgctgggtgcattcttccagctgttcctgaccgtgggaattctgtttgtctacgcagtcgggccgtacacgtcatggactacgctgagcgtcctgtgtgccatattcccagtgttgctgattgtggccatgtttattgtgccggagagtccgacgtatctggtgaaacagggtcgccgaagtgacgccgccgctgctctcaagtggttctggggaccgaactgcaacacacagaacgccgtggaaaccatccaggccgatttggacgccgtcaagggtgaggccaaagtgtcggacctgttcaccaaggccaccaaccggaatgcgctgttcattgctctactgctgatgttcttccagcagttctccggtatcaacgcggtcattttctacaccgtgccgatcttccagtccgctggaagtaccatggatccagccatttgcggaatcgttgtcggagtcgtgcaggtgttgatgacctttgtttcctcggtgttgatcgataaggccggtcgtcgaattctgttgctgcagagcagtttcatcatgggttcctgcttggtcgtcttgggagtgtacttcaagctgcagaacgacaaggctgatgtgtctggaattgggtggcttccgttggcttcggttgtcctgttcatcattagcttctcgttgggcttcggaccgattccatggatgatgatgggtgaactctgcgcaccggatgtcaagggattggcttcggccttggcagtcatgttcaactggacgttggtattcttggtcacgaagacattcggcacgatgcaggagatgatcggatccgactggacgttctggttctttggcttctggatggcggtgtgtacgttctacgtattcattaaggtgccggaaaccaagggcaaaaccaatgccgagattcaagcgttactcggaggaaagaactaaatcaagagactggcagcactatactctacatatagcttatatgctattacgtgtaataccctgtactctcgacataacgagagagggcgctttaattgtaaaatatgtatgtcttgagggccggccttgcgcaatctttgtgggaaagaattggcttgcaggaaaagaaaatttat

SEQ ID NO: 1122 - DNA, 948 bp, Aedes aegypti
atgaccgacccgttggtggtgaacccggagatcgaactaccccagttggatatcagcaacaactatacgacggactgtaccatcgagtactcgacggggaacttcacctgtctggcggtggtgtttaacttacgacggcgtctgggttaccatctgttccacacgtacatcccgtcggcactcatcgtcgtcatgtcgtggatatcgttctggatcaaaccggaagccattccggctcgggttacgcttggagttacatcgcttctgactttggccacccagaacacccaatcccaacagtcgctaccgcccgtttcctacgtgaaagccatcgacgtttggatgtcgtcctgttcggtgttcgtgtttctctcgctgatggagttcgccgtcgtcaacaactacatgggaccggtagcgaccaaggccatgaaaggctactcggacgaggacctctcggaggcaatcgatttcaacaagaacggcttcaacaaaacgcatcgatcgtcggaccttccccagtacgatacgttctgcaatggccgcgagacggcactgtgcatcgataaattttcgcgctttttcttcccgttctcgtttttcatattgaacgtcacatattggacgaccttcctgtagaaacaggaaccgatcaggggcgaacccgttcgcttttactattcgtaaagctatctatcgtttaccgattagttcgtaagattgtttcttccaccagtcagtgcttagtatgtaattttgacttagctgatagttcgttttaagattcaaataaaggctcgatatctaaaggaaagaatgtaaaaataacttaccgctgggttctttttcatatcggtgaaagtgaatcctcggggatcgtagtaaggatcacgactcatggcgcgtgatggaacggtctaaaaataaaataaaacatcaatgaaattg

SEQ ID NO: 1123 - DNA, 902 bp, Aedes aegypti
accgccgtgatcacactgtcagatttcagtcatctcgaggcaagcgactaaagttagaaggaaaatcctccagaattcgcgtagaaaaatggctgcatcgggaaaactttcggttttggctcgccagctgagcaccagttcggctgctgcccagctcgttaagccaccggttcagatcttcggactggagggtcgttatgcctgcgccctgtactcggctgcccacaagaccaaggccctggaagccgtcgagaaggacctgaagagcctccagagccagatgcggtcggatccgaaggtgcgcgacctgctgatcaacccgacgatcaagcgcaacgtcaaggctgctgccatgaaggaggtttcgtctcgggtcaagtacaacgccgccaccggcaatctgctgactgtgttggcggaaaacggtcgccttggccggctggatggcattatcaatgcctatacgctgatcatggccgccgagcggggagaggttgtgtgcgaggtcaagaccgccaagccactggatgattcgcagcgcaagcaactggagagcgctctgaagtcgttcctgaagcccaaccagagcatccagctgacggccaaggtcgacccatcgttgatcggaggaatgatcgtctctatcggtgataagtacgtggacatgagcgtcgccagcaagatcaagaagtacaccgatatcatctccgccccagtctaaggcgtctggatctccggaagaagggtatcggagccgggggccggtggaacgtgttggcattgcaaaaagatccgcacgatggcgacacttcctccagtgattgtttttagcaagggattccttgtagtatgatgcagtacatgtgtaatatcgaaagcgaataaaaatggtaaaatttact

SEQ ID NO: 1124 - DNA, 1590 bp, Aedes aegypti
attccaaacatgtttttcacgttgcaacggacggattacgattggtcctatttcaccgaaccttcgaagcagtactgcgctagtatgccccagggaagcttttggccccgcggcaagttacttggcggaagtggagccatcaacgccatgctgtacgtgcgtggaaatcgcagagattacgatcgctgggaacagaacggcaatcctggatggggctttgacgatgttttgccctatttcaagaaatcggaaaataataagaatcccaatgttgccgatttgaacggggggaaatatcatggcaaggatggatacttgaacgttgaatatttcccaaccaatagcccacttatagacgacgtgttcgaaggtgccaaagagctgggatacaaatatctagaggacatcaacggcgaagaacatgttggcttcggacgcgctcaaggaacgattgtcaatggaacacgttgcagccctgcaaaggcatttttaaaccctgtcaaggatagaccaaatttgcatattatgaagcacacacgagtcatcaacatagaacaagataaaaaaggggtatatcgatgggtgaactttttgattgacgaagaacatttgcgggcagcaaaagctggaaaggaactaattatttccgctggggcaatcaatactccgcaaattttgatgttgtctggaattggacctaaacctctattggagtccgtgggcattgaagtggtagcagatttaccagttgggaataatttacaagaccacgttgttattcctctgtatttccaaattaacaaatctacagcaaaagctgttactttacaagatcttgctaacagttatcatcaatacattctgtacaaagagggattcttagcatctcatgatgtgacttcggccatgggatttataaatacagtcaatttcaccgatgaattccctgatatacaattccatcattttgtgtacaaggctcaaactcctgatttcgcaacaattcaaggtaaatttggtttggaagacagtctgctggctcagatcatcgacctgaataaagaagcagagatcctacaggtgttcgtaacactgttgaatccaaaatcttctggtaatatcaagttgagaagttcgaatccatacgatgccccaatcatcaatgcccactacctggatgatcatcgcgatgtagcaactttgattcgaggcattcgcttcttccgcaaaatgctcggcacgcaaaatttcaaggaccacgaaattgaagaacttcacctgaaaataccggaatgcgacaaactggagttcgaatcggacagttattgggaatgttatgtgcgctacatgtccacaacgatctatcatccagttggaacggttaagatgggtccggagagcgaccccagtgctgtactagactcaaggttgaaattgcgaggcttggagggactgcgagtggtcgatgctagtattatgccaaacattgtcagcggtaataccaatgccccgaccatcatgattggcgaaaaggcagctgatttaataaaggaagactacgccgagaagcaggaacatattgagctgtga

SEQ ID NO: 1125 - DNA, 2699 bp, Aedes aegypti
tgctcattcacttatccacatagtattgcgtacctaccgtacggaggcgtgctgatgacctgtagacagttttcttgatgcaccgcgagacaacacaagacagtttatttgcaaaccatcgtcagatcttatcaaccagtgcaatgaatgaaagcgttggtttgatttgatagaccgtctggagaggaatccgcacaaaacggttctggagtagatttgaacagagaccgaggtgaattcataacctagcatttttcttggaagtgagacatgttctcgttgaagcccatttcttggggatctcaagaaacacattgaaatagtttaattttgcactgcatttttttcttattgccataaatggcaacagcacggttcagactactggctagtgctataaacttaatcgttcaacttgggattgcagagatcagttgttcgacaagtgcccatgtgtgcggatgtgtgattaaattattcaacagatctcatcagcaagaaagttgtgttccaaagcaaatttatccaagtcaaaatttgctatggataatcgaacgtacgttgcggattctcaaatcgatctcagtgctgtggcccaaagtaacaactcgttggatgcagcagctacaaatggcaatggaacggtggccaaaaaaccttctccagtccgggacaaatggggcaaagatgtagagttcatgttgtcctgcatagcctattcggttgggtttggaaatgtgtggaaatttccctacactgcactcaaaaacggcggcggagccttcctgataccgtacttggtggtgttgttcctcgtgggacgacccatctactatctggaaatggtgatgggacagttttcaagccggggagttgtcaaaatctacgatctcagtccagccatgcgaggtattggagtgggtcaatccattgccatgttcatcgtcatgacgtactacacgccgatactggcgatcaccttccgctacttggtggcctcgttcagtgccgtcctgccctgggccaagtgtgatccttcgtggcccaattgtgtcgattccgatttcgttggacagattgtgaacaatgcgagtattaaaccaaaggcttccgctgaactctactttcaaaactctgtgatgcaccaaaacgcctctctgtacgaaggacttggcctaccggattggaaactagtgctatgtctcctcttcgcctggctctgcgtggcaactatcctaatcaaggggataaagagttcggggaaagcttcgtacttcctagcgatcttcccatacgtgatcattttgattctattcgttcacgcatgcacgctggatggtgccttcaatggtattatgttcttcctaacgccccagtgggatcaactgctgaacgttacggtctggtatgaagcggtaacgcagtgctttttctcgctatcagtttgcttcggcgggattattgcctacgcgtcgttcaacaacttttccaacaatgtgtacaaggacgccataataatttcctggctcgacaccttcacatccatcattgccgggtgtattgtattcggcgtgatcggaaatctggcttacgtaaccgagcagcaagacatccaggctgtggtcaaaagtggcgctggactgaccttcatgacctatccggatgcaatcgccaagtttgactggctgccgcagctgttctctgcgcttttcttcctcatgctgttcattgttgggttgggcagcaatctgggtgtgacgaccagtattgtaacggccatcaaggatcagtgccctgaactgaagaactggcaggttgtgtcagcagtggccgtagctggattttcattcggtatcgtgtacttgacgcccggtggaatgcatttactggatattttggattactatggtgcgaaatatgttacgttgacatttgccgtactggaacttgctaccttggcgtggatatacggagtggaccgtatctgcagggatatcaagttcatgcttggcatcgaaaccagcctgttctggaggatatgttggggggttgtaacgccgttggtgacagtggccatcctgctgttgagcttcatcgattacgaagcgttcgtggttcctgtagggtacaatgttctcggctggttcatctacattgtggccgtgctccaattgcccggttgggcattgtatgccactacacgtagcagttcgaaaacgattgactcgtggtggggttcgctgaagaaatcgttctacccgctgcctgaatggggtccagaagatgtgccaacgcggctacgctaccaggaagaagtggaacagcatgaggcaacggtgccgcgagatcgcagtctcatggatgtcatcaagcggaagctgctgagttgatagatcgctggagtaaaggagtaaaagggtgttgatttttttacggtttttatttgttttcaatgtgataaacttatttacattaaagtttaataaacaatgttacaatatatgaagtaaaattccacattttatttatgatctcaactatttgttccctgaatggactatttgtaacttgatgtatttcttttgacttcatcaacttttgtgatttgttacgcgaccctaatataactgtataactcaatattttcttaaacgaagcaagaagaaaaaagtatttaacaacattttgattcaaatgcc

SEQ ID NO: 1126 - DNA, 2112 bp, Aedes aegypti
ttttgtccggttctgattccctgacgccgccgatcaaaaataatctggcgcacaggtcagtctagggtaaatcaccaatagttaaacgaactaaaatctcgttaaccgttatgtttgacaaggatttgaccagttcaacgattggcaaataaccctttcttatcgaagcccgccgtacagcagattgtcaatcgcgaatcgttaacggttttataagagcacgattgtgacccaatacaactgtctggccggttgcaaccgctctatctgtctgctcccgagcagcttcaatgatttggccaaggcattgtctgtggtctgtgacgcgactcacgagtatttatgcatggcgaaaatggcaaacgcaaaaagtgtgtcccaaaaccttgatatggagtaaacgcacaccaaccaacttgacttggtattgagtctttggctgtgcgaaaatcgtttcagtctccagcgccaataactgaaaagtatgcacgattatgaccggtaatacgggtactagtttgtgtttatacatcaagtgaaacggttgtcttaaaacagttattgtgggttatcttcggaccatgccaatcacggtagaaagtttagaaaagttcgttgagattcgtatgccgtaatagacaagaattttctaatttgaatactgttttttagaaaagatgcagaggaatacgatccttttgcgcacaggcaaattaagaagccgaacacaaccatcggaagcttcattcatctggtgaaaggatctttgggaacgggcatcatggccatgccattggcgttcaaaaacggtggactgctatttggtacgattggatctatagtgatctgcatcatttatgctcattgtgtgcatttgctggttggtacatcacaaaaactatgcaggaaaactcaaacaccagttctagattacgcagggacagcacacaaagcatttgaaactggaccgttaaggataaaaccgatggccaaatatgtatcgtatgaaaaatcctccgttccttagtataacctagtataatgcacttttccttctagcatttttatagactggatgttggtgatagatagtatactatctatttgtctgtacattgtcttcatagcagaatcgatgcaaggcgtaatctacaaccaacaaggtttagattgggatactcgaatgtacatcttaatactaatgattcccatcgttatcatcatgcaagtccgggagctgaagcaacttgtcccattcacggcagtagccaatatgctcatcatcgcatcggtgggagtttcgttatactttatcttcagggaaccgatatcacttgccgacagaaatctttggccgcaatggactacctttccctcattcgttagtacggtcctctttgcaattgctggaatcaaaacggttcttccgatcgaaaacaagatgaagcatccgggagatttccttcgacccctcggagtcatgcagagtggtctcgggatcctgacggtactttacggagtaacggggttctttgggtatgcccaatacggagaaattaccaaggggtcggtaaccctcaatctaccaagcgatagcggttgggcagaaacgacacgactactatccgccatcggtatcctagtttccctaggattcaccctatacattccgatggagatcatctggcctcgactggaagcgaagatccccctcaggtggcacaatgtgggacagatcagtatccgaaccgggttggcaattgcgatggttggattcgctcttgttgcacccaaagtggaatcgtttatcggactgttgggatcgtttgggacggcagtgttgtcagtattgctgccggttaccgttgatacgctctaccgatggccaacggatttcggttggtgccggtggagattagtgaagaactcggtgttgatattgtttgggctttttgtgcttacagtggggacgtactttgggatattagatattgttgcaatatatcagtgaggaattgtgtcgttattgttatttgtgttaaactataaaataagagctgagagtaccaaataataaacagatatattgacatttttactcagaaagtaaca

SEQ ID NO: 1127 - DNA, 1557 bp, Aedes aegypti
gcgtgaatcagtgaacccggttttcgctcgataagttttcgatctgatccgatttcgcctgacgtttggaaaatttgtttacatttaatcgccgactggtgtttactccgcgacacgccacagaaacggaacgaaggtcttagccgtctgacacagacaccgcaaagaaaaaaaaaaaagaaacggaacgaagccaacgaatcacagattatcttctattgattaaactgtagtcaatctgttgatctttcctttgaataagctctcccattcgtaatgtcggacgaggaagtgattcgacgccgcttgcaaatcgatggcgatggcacaggagacgaccgccgtttgaatgatctgctgaaaaccttcgtcaagtggtgcaattcttcggacagtccagaaaacagtcaagccatccacgatcgattgctcgcccagttggctcaatgcgaatttgcaatgaaaaagtcggatttctctgcccgggtaatggagcaggagctgaagaactatgccacaatctccgacaccatcgaatcgggaatcgaaacagctaaaacacaaatcgtccagagcaaacagaacctggtgttggccaagaaaatccgcaaaaaccgtatggagtacgatgtgttggccaaaatcatcagccagcagcctgaccggaagaacacaatcaaggagctggaaacgctgaagcaggaaatggatcaactgcaggagaagaaggcagttctcgagcgcaagctggaaacaaagaagaaggactttaccgttctgatgcgatcgatcgtcgagctgcagaacaagctggacgcgatcgaggaggattgccaagatatcgtcgaggacaaaatgtcgtgcgacgatgaaccgattattgtaagtgatacggttatgatcgacgatactgaaaacgaatcgccgaggaagagttgagttcagctggtattataggaatagtcgttagggtaaaacgtcctcatcaaaaataaacgaatctaaaacaattttattttcatctgagacgtttttggaagacgccgaaaagtgaacgaaatgcgagttgttcgttcaagaatatcgtcgagtcaaactaggtaacccacttaaaaaaaagctatattgcagtagaatatacattttcatctatcaaattctgcctttttttaattaaaaaaaaaaaaaaataaaaagaattttaagcttttttttctggataaacgcatagagcttgagatttctgtagctaacttttgagaaatgtattgaaacgtttctgtaaaaatccttaaaaggaatacacgaagaaactctaaaagaaataccaatgttagttctttcaggcatctactacaaagctcatgaacatttctagtgcatcggaatcagttttgaccaactttattaatgggatctctggaaaagttgctgctaaatccttgtaaacaattatgtatgtggattttttttgagattttacgataaaaatccatagcaaattatttatatttgccatgtctacctatgtatatcaagtaatagtcattatactac

SEQ ID NO: 1128 - DNA, 966 bp, Aedes aegypti
atgatggccgagtcggacaacacggcggaagcgacgagacggctcaacgtcaagaagcaaacgctggacgatgcctatgcgattccggccaacttcctggagatcgatgtggtgaacccgctgacgacggtgacggccgggaagaagcgctacaccgactacgaggtccggatgaggactaatctgccagtgttcaaagtcaaggaatccagcgtccggcgacgatacagtgacttcgaatggctacgaaacgaactggaacgcgacagcaagatcgttgtgccgccgctaccgggcaaggcgtggaagcgccagatgccgttccgtggcgacgacggcatcttcgacgagaacttcatcgaggaacgacgaaagggcttggagcagtttgtgaacaaaattgccggtcatccgctagcccagaacgagcgctgtttgcacatgttcctccaggagcccaacatcgacaagaactacgttccgggcaagatccggaacacacaagtcaaggtagtggatcgtcggcaggccaagctgttccacatgggttatctgtatcacaaaagtggtcccgttcggagaggagtcgtctactaccgatgttcgaaaatgcgcctcctgaaatgcaaagcgacgctatcgctgaacagcagcaccggggtgatacgattgggggctcaacatcagcacaaccatccaccaacacctgcggctggacaacgacagaacgtaggaccagtgttgaccgatgaggacccattccaagggaaaaagatgatgtaccaagggttctacttctaccggaatggagcgtcggaacgtcggttgtactggcgctgcgccaattccaacacccttgggtgcaacatgcgactgcacaccgatcgccagggccagatggtggaggtcaagcaccaacatctgccccattgtgaagccttcgcactccatgggttagcgaattga

SEQ ID NO: 1129 - DNA, 2838 bp, Aedes aegypti
caggcgtcgtccggcttgaagatggcttatagctatgtaggtagatagtgccttctaatgacacgagactttgactcgcgcgagttaggacgaagtctggtcgagctgcaagtcgcattgttggataaaatccgcgcttcgcatatatacgaaattgattctagcacttggtggacattcgtcgctcgaccgttgaaatgataagaccgtgagttccgcgagataggtgaatgcgcgcgtgatcttggccagttttctctcgtgaaggtgtttgattttgattgattttacgacagcggggagaagaagatttgtgcaaatacggttcgagtgacttgccaaacgtcaatcgataaggatttgctgtgaagtgtatcgagttggaaaccttcaaagaaatgataaacagtgtttaggcagttcaggaagaagaaagcgaaatgaagttcgataaaagcaacgcacaatcacccttagtgggtgatacggtcatcgaaacaccgcatgaagaacccgaatacaccagaagctcaaccgttattccgacagtagttgttagttgcatatgcttagaagatagccgtaaaaaaagtgttgaaaaggaacaaagggagttacaaaacctagaaccgttggagaaaacacaagatccgaagaacccaccgacaatattggcatcattctatctagatgggaagctagaagagctggacgagcaatatttgcaacagaaggaggaagctgacgacgagaaatttcattctacggtcaagggagttttcaatcagtgtctggtgacatgtgcagttctggtattggcggcagcatgcgggatgccgattggatactcggccgtgcttcttccccagctctacaacgtcagcgagccgctcttcatcgacatcgagatgggctcgtggatcgccagcgtgcacagcctagccacgccaatcggttcgttcgcttccggtcccatcatggaccgctggggtcgcaaaccggctctgatgcttgcgatcgttccgctcttctttggatgggtcttcctggcgactgcgtcatcgcacttcctcatactggttggacgagttgttgccggtatagccgttggattgattgccgcccccgcacaggtcctgctggcagaaatcgctgaaccacatctacgcggactgctcatcggagtcccattcgtgtcctactcgttgggcattctgctggtctactttttaggaagtttccttcactggagagaggtggcctgggctgggacagttcttcctgcagtatctttcctcgccatagcagtgatgccagaaacgccggtctatttggcgcgaaacaaccagctccagaaagccgcaaaagccctgcactggctccggggatgcccgatacaggccaaacgggaactggtccagctgatcattcgattccgcaacgagacactggaaggcaacaacaatggcatctggaagtcgttggcggagatttcgctgatcaaaccgctggtaatcatcaacagtttccacgtgctccagatcctatccgggacgtacttggtggtgttctacgcggtcgacatcatctccgatatgggaggcagcgatatcaatacgatgcaggcagcggttttgacagccgtggtgcgactggtgttcacctgcttgtactgcttcctactgttggcaatgcctcgccggacgatggtcattggcagcggaatcggttccggtttgagctgtttagcgattgccattttcatgtacgctcgaatggacgcgttgaagacttcgatggacacctacgtgatggcggtgttcatcttgatctacatcggggcgaatacggggttcatgaccatgccggggatcatgattggggagctgctgccggcgaagatccgcggccagatagcaggctatctgttcaccatattcaacttgctgttgttcggggtagcaaaggcatttccctacgtaaaaaaggtgttcaaaactcaaggactgtttttgatattcggggtggcttcgtttggggcgtccctcttggtgtacctaatgctaccggaaacgaaaggtaggacactgcacgacatcgaggactacttccagcagcgaaactggttctgggtgaacaggaggataagtcgtatgaaaggggatacgggggtagaagaagaggggacgccattgaaggatgttaaaaaatgagtcacagataaagctggaatcatgaagttggtcaacttataactttacttgtacatttttgtaaatataagtgtaagaataactaatatatttcgttgaatgtgaaactttctgggcctctattggatgaaatgtgtattcagaaatttagagattataattatgtccatttcaaatttcaataaaattttttgacatcacacgacatacaaaattgtttcacgatcaatgtttttgtaaggaatttcaaggaattatcgttaacactcttctattctgctctgttctatttttcctcattccagaatttcttgttttttaagagattttttgagaattcattcaccattttgtcaagacattccttctaattccttctaaatgggcttgctttctaaaatgtgtaaaactacttcattttcaaaaaagtcgctaacattttttaggaataaatataaaaaatccaataaatgaacaaaactaaatttatatcaagttcaaacaatgttgtggacaacaagtttaagaccaatcacaatctcgctgaatcattcattcctgagcatgaattttatacaggagaacaattataacaaacatgaagcagatctaaagtcagattaat

SEQ ID NO: 1130 - DNA, 6994 bp, Aedes aegypti
gcgtcataatctgctggctttgcataatttgcggttaacgctcgtactagcatcaattctagtcggcatctgtgaggtggcccaacatagtgtgatcattcatcatcttggtcagctggaagcggaaccttcgaatggaggcggccatattccaaggcctaatgaggatgccggtggtcagggcggtttggaagatggactgcccgaagctgaatcgaacaagaatgcacaccatgaagagctaaattatggggtgtccatggaaacggctgttatgggcctgtgttctttctgcctaggaatggtttcgattattgtgggagcagtattcgtgcgagtggtggaacttaaagatgaatatggactattatatatcaccatgacggttcaaggcgctcaatgcattgtgaagtggtgccaatttgaatacatctatggtgtcacggacagcgtaacggcgctgtcgacgtcgttgacccttggttcgtcgctggtgctggcagcacttgccattgccgatggtgttacgctgtatcaagagcgaaactcttccggtcgacggcacatatcgttgataatgtcaaaagatacggcgacagcgccgatgacgggtaagggccacaagtcctcttcggtgccgttcctgtcacggatcactttctggtggataacaccgctgctttggcggggcttcgtcgagccactggagctggaaaatcttggaaaactccccgatggggacaccagtcggttccattacgatcagtttctatccatttatcagcgcttcaagacttcgacccacgccctctggcgctgttacgtgttcaactgctggcaaatgtttctggctggtggcgtttttaagctgctgggcgatctatgtgctctggtgggaccactttgcatatccaatatcgtcgattacatcgcaaaacccgtgacatcttcatcgttgacattgaccgttggcagagggggcggagaaggaccgggaaacggtgtaattccaaaggatgactcttcgttaccggcggagtttaatcttgggaatcaatcacttttgacagatggcaccaccatactgggtgagaaggttcaattgggtcctctgacctggagcgaattgctagccaatggatggtttgtcgcagtggtggtcctggtggcctcgttagcgcaaggaaccttttcccaggcgagcacccatattatggatatggagggcatcaagctcaaaaatgccctacagggattagtgtataggaaaactttgctgctcagtacaagctgtttctattccgacggcgcccgcgaatcacgaaaagtttctgaccagaacaccgccgatgatggaaaggtggcttcgaatactaataaaggcgagattgatgattcaacaagcggtggaagccagcaaggacccaaccgcatctcccattccgtgcctcctgaaatcgataccaacatgtatcgtaccgctgacgtaaatctgcctgatactgacatcgataccaaggacagcagcagcgggaatgcttttgcacccgaaacagatgtttctaccgcaacaccgccggtatcggcaccggaatcgacgctattcatccagcaccgacaggaggagaaacagcgcacaacggaaaagaccaaagaactaaagataaaacatgaaatacctgatgccatcgatgataccgatgatcagcaacagtttgacagtgcctctggtgcatcgcagcatcgtccttgctgggcatcggcgtcaaggatgcgtaagcgtgatctatttctaggctgcatcggaaagcaggcgaatgccgttgcatcggaagccgcaaaccaaaaacaggaacaaccagaacaggacgacggaaaacggaagaactcggcgaggcatcccggcaagggagctccggataatcgacagggttgtggtggcagcgatggtggtaattctgcagcgaccaccgatgccggtaccataacaaatttaatgtccgatgatgcctttaacgtgatggcattcgtgaagattgcacattacgtgtgggctatcccgctgaagattggcgtagtgatgtaccttctctatcgcttgctgggtgtcagcaccattattggatctttcgtatgcatcatcacgatgactcctctgcaatttgtaattggaaaatatatgtcggccaactcaaagaaaacctcggaatgtacggacgagcggctcagacggatcaatgaagtattgctgggaataaaattaattaaactcagtgcctgggagggggtgttccgggagaagatttccaaagcccgtcggaaggagcttaagcatctggactgggactcgtgctattggacaatgatgatgctgctcacgcatatatcctcggtgttgataacgttcgtgacggtggccgttttcatccacttggagcacggcggaagttcggcggagtcttcagccggagacggaaggatcgaatttaccgctgcccgtttgtttgcttcgttggcactgtttaaccaactgacggtgccactgtttatctttccaatcacgattccgattatcctatcggcggtggtaagcaccgggcgtctggaggtgtttcttcgcaggccggaagtacgaacgatggttgcgcggccgtccggtcgtccttcgctggatgtggttcgaagggaaagcagcgggatgcgaaatttgaaccggaggggcaaacaaccactactgggcaaagttgccgtaatccgcgaccgggaggataatggtgatgagagctttgcgaaggatgtggtgctcgacgaggaggaggaggtggtggaggaggaggaagaagacaccaaatgggagcaggaaggtgctatgcacttcgagtgctttgatctaccggaatgtgcaaccatccagtcagaaactccaaaagctgacaacgagtgttcggaatcatcggaatgggaaagtgagattgagccagatgagcaattacggggaactgaaactttccccggcatggatggcgcagtgtcaacaggtaaaacggcattcagatacaccggtgtcccttctgcaaggcgaagtgaaaattcacagacgattatcgatgacactgatgataggtctgaaatgaaccgcagaatgaattcacaaacgaaggttccccgaacgaataaaagccaattgtttacctgtccacgattgagggaaaaacgcctacgacgaaaatcgcatcatgccgagttgacaaggaatgatgatgagagatacgagccggttccgaaaaacgacgacggtgcagaggaacccaataattgtgctccggttgttatcgtgcgagatggccgtttccagtggggttgcaataatgaccgaagtgaaaattcccagaactctggaagcgtccttgtagttaaccagcttagtattcccaaaggaaaactcaccgttgtggtaggccgcagtggcagtggtaaatcatcattactggcagctttattgagggaaataaatcatctgtccggagaagtaatttggagtcaatattcaacaattgcttacgtcccccaacggccctggcttctgaatgccaacgtgcgagaaaacatcctgtttggtgagccatttcggccaaaacgctacaaccgggtgctgaaagtctgcgcactcaagcccgatatcgaactgatgccggatggcgatatgagcgagattggcgaacggggaattaagctgtccggaggtcaacgccagcggatcgtgattgccagggcactctactcgccggccagcgtggtcattatggacgatccactttcatcgctggacaacgaggtcgccaagtttgtgtttgaccatgggattcgccggatgctgacccggcaaaggcgaaccgtcgtgatggtgacacagatgttgcagctggtgtacagcgcggacaatataattgcagtggaggccttcgccgtggaagcaacaggtacattatcggaaatcgaaaacaattactcacacattctgcagaagtgggatgcaattatcgccaaggagcagcagtccaaggagacgcaattaagtccagggagaacagctcgggagcgatggaagttgttcaaaaatgtgtcacgaataagtttcttgagaagtcatgccactgaggagttctatgagcctccggacgcgccactgctttatcgaccgagtgctaagcagcgccacagctccagcagcttatttggatcacgttttcacacacacgatttgccacttcccatcgatgagtgctgccacggcgagaatgtccaactgcgacgtcactactcgaaacggtaccggagtggtggtggtgaaagtaatcgagtggtccgggggttcagcgatggagttgcaacagcggcagccgcagcgaaggacaactcccaatcggcggagcgtgatgcattaggcaacaatatcgttcgatcccggtctctccaaacaaagcggggcatttacagtcccaaccatactgtcgatggtcgattgctcccagcatgcagcgcccatccgccgcagtcaccaaccgaactggaccatcctagtccttcggaaccaacctcagcggttgcagccagcgacaaacttggctacgaaagattccgttactccgacacttgtgaagatttgcacaaatttggctttcggcaatttctccgaagaatgagcaccatcggacgtgctcgccatcgacatcgtcatcggtggcgggtgtcttgctctcctaccagggaattatccaccgccatcggctccgtgaagagtccagcgaaggaaactgatgccgacctcgaaagaagtttatcacatcccaatcaatcgctccatggaatgcacaatcctctgaagaggctcttctcgaatatttcacgctacagtgaggaaacggatgatgatgactgggaagaactcaacaatggcgagcaagtctccaatcgactgatctacgacgaggagcgcaaatatggaaagattccagctcggatatattggctgtacttgaagtcatgcggaatggacattgtgaccacgttcttccttagtgccctggcccagcaagggctccgagtgtacactgatttctggctacaaagctggaccgaacggacccaacagcaatcgttcgacactaatagggttgaaccggcagaagttgactataacttccgggtgtatgcagtactgtcggtcatctgcattctcctgtctgtggtgtgtttccctgctgggcagaaagcaggaagcaatgcccggaggcgactacaccagcagttgattggagcggttctgaaaaatccgatccatttcttccaaactgttccacttgggcgtatcatgaatagactgagcatagacgtctccgtagtggacaagaaaatcgctgcaacaagtcaaaagctgctgcagtttatcctactgtgcctttgtgccgtgctcataaatagtgtcgtaacgccgtatttcatcctgttaacaataccaatttgtggcatttactacgtcgtgcagaagttttaccggtgctcctccagagaactccaacgcatcgaaagcatcacctactcgcccatcatttcgcacttctcggaaacaatcgacggtgtgacaacgattcgtgcctaccagcaggagtcgcgtttcaccgataccttgttccgtcgcatggaagccaataacgttgcccaggtcatcctgaactgtagcaaccgatggctgggaattgctctcgattacctgggggcattaattgtgttcattgccattctgagtgcactgataacggcgagcttgagtccggaatcgacaagttcgtcccttattgggctggccatcaactatgcattgttggttccaatctacctgaactgggtcgtcaaactggctgccgagatggagatgtacatcggagcagttgaacggatacagttctacatcgaaagtagccaggagcgaatcagagagaaaagcaaacggaaatacaaacctgtaccgatatcatggccccagaagggagacatcgtgtttgaaaacgtttcgcttcgatatgagagtcaaaaggacaacgtaatcacaaacttgaatttgactattccggctggacagaggattggcatatgcggtcggaccggcagcggcaaatcctccctggccctggcactgttcggtgtgctggaaatcgtcggtgggcggatattgatcgacgacgtggacatcggtaccattcacagcgatgaattacgctgtcgactctccatcattccgcaggatgcgatgctattcgggggaacactgcgggaaaatctggacccacgggggcactttagcgacttggacctgtggaacagtctggagatggcacagctgaaggacgtcgtggtggcactgccggacggattggacaccaggctgggcgaagaatcgtccactttcagtgctggccagaggcaattgttctgcctggcgcggtccgtcctgcgagggtcagtttgcttggtgctagatgaggctacatcttcactcgatacggaaacggagaaattggttctggatgctgctgggaaagccttcaaaggaagaacggtgctcacaattgcgcatcgattacactcgttgttcgattacgaccgggtcatcgttctgaagcatggcaggatcatcgaagacggttgtccccggatactacggagaaaggtagattccaagtttgccaccatgctgaaggcctcttcaaccgagaatcgcaaacagccgttgttaccgaaacccgagcagaaacggcagcacaaatcatttatcagtgaaaaagaggaaacgcagtgcgatgagggagaaacaagtgtttagttgcagtaattggttgtgttttatggtcatgtcatgtaaaataaatcaaaatatcttcggaatatgtgcctgcatgtcttccataataaattcactttggttataatgttctga

SEQ ID NO: 1131 - DNA, 810 bp, Aedes aegypti
atgaaaccgccaactgcagaggactccgctacgccggtcaagcctgagatgtcgacttccggcacgggtagcggaacgcccactacggtggcgtccacatcgacgcaaacacaatcacaacagacacccggcggaggaaccggaagtaacgcctcaaacgccttcgggacggtaaaatatcggatcaagccgccatcggcagcacatgcgcaatcgtcctcgacgaccaccggaccacccaacgctggatgcttcatcaagccttcgctgtcgctaaactcgctgccaccgcaagggccccacgaggggtccgagatggcacaaaacagactgagaatcgatcggccatacaatagcttaaagaaaaagcgcgactcagagcgcgaactgtggcgccggtcgtggggcagcgggcacagccatagctcctgcagcttgcagagcagcatcacgaccggcatcggcaaggacgacttctgggcggcactgcagaccaactacaattttatcatggacacgaacctgctcgacagctgtcgggaagcgcgaggcgaaatcgaagggtccgttgtgcgacccagggaggaccacatggactactatcggagggccatgttcaaaccctctccgatgcagacgttctacggagatccccgcctgctgcggcagtggatcagggagatggagattcgcatttcacggattccttcgattacggagacgaagaggttgaacacggagcagttgctgaggctctctggagaacattcggtgagtaaatcacagcaatctatttttgaacgacgctga

SEQ ID NO: 1132 - DNA, 2253 bp, Aedes aegypti
aactgtggggtgactgtatatgtatttaaaatgttcatcgttatactgatctctagatttacgtctcataaatctgttagtgtgttagctatcttattacttttatttctcatatttttcttatgttgcccagtgtttatcttatctttttccaacacattctctgaacacataatgcgcattcgctccacctgatgttcgctgttttaacccatcttgatgaaaattccataaacaaccggtttgaaaggtgtcctttttctactgttgatgttgtacccggtcaccaaattgaagttctgtcatatctagctcctgcctccctctgacacttacattttttgaacactaacacttctctaagtccggtatgcgagtgctcttcgcataccatggagctgtcctccgttccctctgctttcggtatcggaattactctacagcaagttttccaatggtatctgttattattttcactgcagggaagtacactccaaaccgcttagtacgaccctggagtcagccgtggaatcatctagcggcgcatgttcggtttgcccgtgggactccccaccgacctccaaagctttggtccctgtcgaaaagaaatccgcggctgccgagaaggaagctcaatcgtccgtttctgtatccgtttgtccttgggatgatggcgatgcaaaactaccttcagacaggtatctttctggaaggagtatttaaaggacagtttttaaatgcatttcttctcagttctagcaaaacaaaagctctgaatgccatccgttcatccaccgatatcagcgaagtttcggaacgcatgaagcgatcttgtgggcttcggcagaataccttggacagcgactttcacagtacaaaacggctggtaccggttgtgacggaacaaagacgagcttccatgacaattgcaccgaggttgtccgatttacaattttccatacgtgcgaactcagctggaagtgaaaccgttggaagcagtgcatcactacaacagcagcattctgtggactactctcggaatatattgcaaggatcgctgtcaactagcttcgaggaacgggaagatgcgacgggaactccgaacgtatcggaggaaaatttagtcaagataaagaaagatagtgtgtcggagttagagcaagatcaatcaagcattgctacaaacagtgttgttcagaataaacctactgctcaagtgaacaaaaacaatgaacgtacttgtgtgtgtgccacaatacaaacagacattactgcagtgggatatagtgtgaagcaagaagaaacaaaacatattacagaagaaaatgtcgctgaatctaccaaggcaatgcccaccgccgctggagctcaaaaaagtgaagtaatgggaggggaaaaattgccacccacaatcagtgtatgctttgcaaacaactcctcggaggaggagtaccgtcgaaaacgatcattagaacccagcggcgagaaaatgttcgacgacgagcaggaggtacgccaggaagtggaggaggtatactttaccagcgaggaaaatgatgaagaaggtatcggacccgggttgtaccaccgaatgccagaaccgccccaggatatgtctcctctggcggaagatgacaatttctccgaatctctctcccaaccaaatcagtcctcgctggagcaggtcgagtacgacatcctgatggagggagacaatctggcaccgggatgtgtggccccagctcctacgcctgcaccgtctatcgcaccgctggccgaagttgagatggatcccggtgatgacgaaccggaaacggagaccgatcacaccgaaacggtgacagtgcacgtgaccacccgggagaaacaggaacaggaaccggaagcgtccgccggggcaaccgtagtgatcatcgaggatcaggtgaagcgcaggaaacgtcgagaacgaaaggataaggatggcgttcaacagcagaaaagtgaggaagacagtagcgaaaagaaggggaacgccgtgtgcccctgggatgacgaagatgattctgctacggatgatgctccatatgtgaaaacgtactccactctaggttatctgtgaggattttaaacatgaactacaaaaatcattcgaagcgtggatccggaaaacagtaaagttatgctgaaggtggagttattttttgaagaaaatgtattgagtgtgttccttgaagtactcgtttatgataccgttaagaatgatgtatcgtc

SEQ ID NO: 1133 - DNA, 285 bp, Aedes aegypti
aacgtgagcccaaaagaggccaatatcgccaagaaacctgcagacgacgactcgcgcacttcccgtatcagtagcagcagtagtagtagttcaatcaaaggcatcctgaaaacttatcctagtcctacgcttatcaacgacacaatactactgctaaagcaaaaataccggaacaaccaaaacttcgtctgcagacgaccaaacttgatcgtgtgtcctagtgtgttgtgcatgtgtgtatgtgtcgcagtgaaagttaattttgtaccgtctcgaagaagctaa

SEQ ID NO: 1134 - DNA, 6753 bp, Aedes aegypti
gtgttttcaaattttggttttgaaaattgtttgaattttaaaaaatgtggttccaaggaaaccgtttggattgttatctttgtaagttaatatttgttgaattggtaagttaatatttgctctttttcaaagagatttcagtctttcaatttgtttcagtcttgttgttttgttttttttttttttcaaataacgtgtacaaatgttttgattgtaaaattagttttacatcatttccttagagaatacgaatggaataactcgcaaatcgagtagaaaaaagtttcagtgaagtaaggtaaatcagttgcagtgaaaatgtgactagttcagaaaatacgttccttggagggaatcattttgaaaatcgaataaatccttgacctagacgatggaaaagctagttggacgaaacgtccgaaactctatcaacctcagctatggaagattctactcgaaacaaaaccagaaaaaaatccaccggaaatccctcgtggctgtggtctcttctcgcttgccgcctgggcaccgtccgtaccgtcaggctcttctcgctggccaaccacagttgttgtcctcatctccgcctccgcagccgccgcatccttcgatgtcctgtccctccgttggatcgtgctctcttctcgcttgccgcttcgaccgctcgccggcgatcgaagctcttctcgcttgccgagcacgaccgatggtccctccgctaccgcattccctattgttctcggcccatcttctcgcgactttcagcctcctcttcacgcttgcctgggccacctgtctgaaatcgtccgacgtcggtcgacccgtacccgcgcgtcgcgtgtcgttcgttttcttccgtgccgtcgtttcgtttctcggttgtgctcgtgtcttcttcgttttggacagttgtttttaggaataggaagagaaaagatcaatttctcgaggcactcttccgggcgtccttggttggggcatccaggctcaaggtaaaaggccgcccggctcgcttagccagctcggccagtattggaaacaaaaacaaaacccataaacggtcgtcgaaggttatataatagtagaacagctttcgcatcgataggttaaaataggaagaaaatgttgagttttcagatatgtgcgttttctttttgtttcttcttgttttttaaatattctggaaggtctcgaaggaaggaacttgagtgtgttggtttttcatacgtattattctgcatccgacgatgatttcgatgattaacgcccgtcgcctaatcctagaaatttgtttgcccatctattttggagtagtggataagtggtggttttgagactcgtaaacgccgtccaaaaacttagttcaaccacaggaagagaaagccttttcgcttggaattggcttgacggcactttttcaacttgtgacggcgtttgagaatgaacccattgagcgcggtgttcatctctgaagatctcgtagtttgcaaactttttgtatgatatcactttcacttttaatgttctataataagtccatggatggaaacatgcttttcgtattataaatttaccatcttagaatttttatcacattatcacgctctttcgaatcgtcctttgtggagaggatgaaccccattttgcgagggaattcacctcattagagcggtagttttaattttgtttcaggctaagaaagccttttcactaaagctgactccgatcggtagtagtcgattgcgtctttactcgatgaactttcaatctccttcggtgttcatttcaggaaaatttacagattactttcaattttttacatttctctacactgctgctgcagacgaactagaatgaaccccattggacgcgggaattcacctcctgttcacgacaaactgcattttgggatgccgtttccgttgccaagctcggatgagctggcgggcgcgcctggaagtgaaccccattggacgcgggaattcaaatccggcattccacgagaatgaaccccattggaggcgggaattcatctcggcgccaaaaaaatctgcattgacgttttcacgttgttcacgggtgaacatttgcgggtgaaccccataggacgggggtattcatctcgatatttggtattcactggtcacgatgaatcccattgggtgcgggcattcatctcgatcaaatcgcatcaagattctgatcatgttttcgaattctgttgaagatgctgaccggcgttgaaaggaatgaacccatttcatctacattgcatgagaatgaacccttcggtttgagggatggaattcatctcagcagttgactagaatatcacacgttagatgtttgatcgatgggaaaaccgtagcgattcaacgaagatgaaaccattgacgtttggaattcatctcgtaaacgctctcttaattgattgatgaactcgttgacttttcaatactaggggaaaggccccttctacgttgcaattggtttaaatcactctctcgaaatcgcatagcgatgtttcctagcagacgatgtactatcgctcgttctaatgatgaatcatgtgttgatcaaaatcaggaactctctctcaaaaatcagcctccacaaacgcatcaaagccctttggttggctggtcgaaactcatttggtcacattttcacttttcctcaagggtgggggttgcaaagctccgtctcatcggatggaaaaatttcctctcatctcactgttcactctcacttcactgctcctaaacctcgatgccctcaagtaaggggggggaatttcctatcactgctccacgtggggacattttcctcgtcaaaaaaatcggcctcatcggatgatccactccaagggagggacgaacgatgccaaatcggtgacgcagccatcagtacgtagccatagtagtacggatgatgccacggtcgaaaaattcggaaaatctcacaaacaccactgagccaaagcctacttcatggaaaggggggatgattcggcgtcgaaaaccctcgaatcgttcaatcgatcgtgtacccaagttacaaggaacccaaatctctcgcaagatatgcgtgtcaatcatagatttagtgaagaggggggcgacaatagcccatctgaaaataaaagaaagaacccctcttccctcccacaaggttatgtttaaaaaaaaggaggggcgttaccgtaacgttttggtctcgttctctgcttgatattcggagaaaaccctattcgtgtggtcactgttcggaaactgcgctgaaccgatcccgtttggggtgcgtttaggtcttcttgcggtgcgtgcgtgcggtggatgacatccatcatcaatggttgttatcgaaaagggggggatgcaacagacggaatgtatttcgtgcaaaatctgctcggcctcgttgctcgtggggatgaaccaagtatgtgaggaagtagtgtagcactagtaatagtagtagtagtagcggtagagggtgttcgcaattatctctgcgccaaaccggaaagaagatagaagcggcgatgtgcacaggggccacggccacgtccttgcgcgacggccggcttgcttggatgaatcacttgatgcttgcgggcggtatgtgaatggttggtatggtgtgtatgtggtctacttgctttttttacgtaacgcatgctccaactttatacgatattaatatataatatacacttggtttgcgaatgtgaatgtgcactaaatggcattacaatacttcagaacaatagaaatgttataaatgggggttacaatttcaagcttgatcgaaatcacatagcattttggggaaaaaactaacggcacttctttgtagcttcacatcactatacaatttttgtttagattttccgctcgtatcgagcaatgcggataaacatttcaatgaacattaaagaaaaacatacaatttctagaacttcaggttcaaaatcacaatacaaatacaatgcaatggcttttcggtttctatcatacaatgaaatctgttggcacttttcaaaagcatattacaataaaagaaacattacactttgaaatcacaaattttcaactctcgtagctgttaaaacacactaacactagtgtaaaaacaagttaaacaataaacaattcattcgttgtcaactgctaaaaaacactgggacaaatcacaagggtaaaacggtacaaactttcaacttcttttttccattttcatcttttcagcgctgggcaattcacagaacaccgagcacaattttcattttataaagcataaattttcaacttctaatcattttgctactctacatttatgaggggggtgctggatgcccatgggacaccgagcgagtagccacgtcatttacactccgcaaatttcctatccatgctgggcgctgcagagcaacaccgagcgaaatttgcctcgcttatttgcacatacttttcttctaaactttgctctcttcgcataactttcattttagggcgctgggaacttcaccgaagccgcagcttttctgttttctacaatcacatttacaatacattcagtaagcttttgggttcgcttcaagcgtagcgcaattcagcttcaatcttctgatttcatttttttcatgtcacaatagattttcttctggtggggtttcatttgaaaatttttggtttgcaagcacaatagaaataggcatattacatcgatcagtatatgtgtgttagttatgcgatagaaatatgaacaaactactacaagtcagtcactgcttaggtgctaatatatcttcgattccgtacacatttgcacttggcggaataatgggattacatattttgttcagtgctcttaacacacaaaagcatttctagatggaggataataacttattttttcttgatagaatatacacagtagaggttaagcataacactttctaaaaatagaaatggaaccacgtatgtgcgtaaatgtaaatgtatataatatataaaaatgttacataaaagcccaaaacatagccttagttcaagcgggttgtacaaattttccagtacttctaactcttaaaatgtaatttcacagccagtatacagtaaaaccaataaacgtataaccacttcaaacactagtagtaaaattagagtgtagtaacaattgccgttctttttcgcttctgtaaaatagataaattacgtgtttaatcataaaaacaaaccccgctggccgactgaacgccaaccaagcggttaacttctaccacaaagtaaatcactaaacgcactacaaagtgaattattagatcggtttaaagacgtaaaaaggtagagtaaaaaaagttacaaaaatagagtaaacaaaattagcatagctaccaccacatgctctcccaaactcttcgggtattggggctttcttccgaatcgcagtaggcgatattcgtttccacacttaaaacaccatctctctctctctttctacagaggtgaggcactaaatcccgcgttagaagaagcacgcataacacgacgcaattgctgaacgtcacaagaaaagccagatgtatctgctgaagaatggtgttggtggtggtggtggtgggaaggtggaccgccaaaaaggcctaacacgcacacgcacggatctaaccttggtcgcacaatttcggaaaaacgccacacgagttcggtcgcgatgtaactacgtctcagatttcgattttctgcaaaagactaaaattctggttgtcgggggaaatatttcaacactggtttaccgctcgttccaatttagagtgtaccgtcgtcgacgtgtcgcccttggcaactgcgcaatttcttggcggcatggcctgccttctagatagctagttttgtcttccgacgcaatttgttccatttgtggaaatttcaaaagctgcaaagtacgaaaattctggttgtcgaggaaaaaaagacatttgcttacgttcaacgatgaaccgcgcgctccattcacaatatgtagctgcgatgcgtcaaatttgtgttctggttggcaccaactcggtcgctcgaaatcgccgtttcccacattgttttacaattttagctgcaaaaatttccaaattctggttgtacgaactaattcggtaagcttacggtttccgtggccgtccaaaacaggtcgctccttcgtttcgaatggatggaatgcttcctttatcctctaaagatggaatcgattccccccttgcggagcaaagaaaaagacaaactcacaagacgactcgttgggctcaactgcaaaagaaaacggagattctggttgcgaaggtatctgttgtcaaggttaccgctaattccgtcgtcgccctggtcgtagccgtgtcatacaatgcctactgcatcgtaacgacgtgctctgcctgccgatctcctctcgttctgtctctgtcttgggcttttacatgccctcatcttctgtctccctgagtacttgttaactctctctctctctgcctttcctatctgtgtgattgcttttccaactttttacggggagggtatgtttgttatcgtgtttcgcaagattgcgtattaggcagcagatgttaaaaataagagaaaaacaaaagaaaaacacagaaactcggctggttatgagagccggaccggagttgtgaaagaaaagccgggcctttgggcggacgttttcccatccgaatccgatcgcgtccatttccgggaa

SEQ ID NO: 1135 - DNA, 867 bp, Aedes aegypti
cgtccgccaaagtcacgacggataacgagcgaaagtgttgtgcgaggtttattcgtgaaaaaagtgttactgatggcgtctggagtcacgtacgcgcacgtaaagccctggtgttgtttttggtgaaggaaaacagtgcgtcccggtgacggaagtggccgaaatccgacagggaaattgatccgccggaagcggtataaccgagtttaacagcacacgcggaatcagctaagcaagaatcaataatttcctgagtgaagaagtgggaaagagaaaaaagtggaaaaagtgcaataatattatattttctgtgtaatcaaacccctggtcgttgaaacagcttgggcatgaaaacagtccaaacttcggaagaagatagatagtgacggaggaaaaacgagtgtgaagagagaaaaaaaaactcactagatgagcaaattttttgacagaaaacaagttacccgagtattgggaggataaaaatacgtgccagtgtgaagagagggagatagttaaagaaaagtgtaaaaagctaaaaaaaacgagatcattgtgtttccatcttgttttctctgcctattttttttttttgtttttcggggctgtacagttaattagtgtattaagatgaaccggaatttggagtgttcctgctgctttaataccaactatcgcaacggttgctggtgctattacttcaatacgaaccaagcccggtgtggttcgtcgtcgtcgtcgtcgtcatctcaccatcatcgtcatcagcatcccaaaggagcagcaaccgtcgttagctcgttgttgtcctcgtagggaaccatcgtagtcgcaaaacccacccccaattctcgtgcatagcatacacac

SEQ ID NO: 1136 - DNA, 1103 bp, Aedes aegypti
attaccatttggtactgtcatgcgaacggaagtgtaccgacagtgccggtgctttttgcttgttaaatataaaattttttagctgatatagttatagaagtgtttgaattcgattagcagatcggtactattataagaaaatggggcagaccagttccagatatcatctggacgccaaaagtcctttcaatcttacacggtggtatcaaacttgctggaaacgcttgaatttctctcaactgaaatcctggggattcatcgatggcagcctgaagagcagcatttgttcaaattcaaactgttcaagttgctttcaaaatggagaaccgtcagcgcaaaatatctcatcggcgatagacaatcttgtgtccgtgattggaaacgttggattccaattggctgtaaacagtcttgagatggagaacctcgagacagcgattttccatctgaaactgggcgcccgtcacctcaatgccagtgctgtattcaatttaggaatctgttacgaacttggaattggcgtcaagaagaagtcaaacatggcgaaaaggtgcttctatgtggcatcgaaccttggccatccgggggcaatgtacaatcttggcgtttactatgctcttggtctcggaggactgggccacaatcggaaaatggcgaagatgtgtttcattgcggctgcggttttgggccaagaggatgccattgctgttttggaccaaggctatccgcaaattgtacggcaagtgaaggatttagaggaccaggtttcgccagataatttacttattatggcaatgcttgttgcattgatgacagtaacaatagcagccacatccatttctcgtttgattgttttcgaaaaatatcacgttaagaaggtaatacgttcatgtaaaatacattacaaaacagttatgttccagcaaaaacgccaacgtattttccaaccaagaaagatgaccggtgggttgaaacactggatgaaaactcgtcttttggaaggccaacacatcgtcgtatgttaaaaatagtatcatatttatatcgatcaaaacattactatgaattagataaataaatatttaaacacgtttactacacct

SEQ ID NO: 1137 - DNA, 3176 bp, Aedes aegypti
taatgactttgaacgcaactgttcttgacaagatctagctttagatataaacatcttaccaaaaataacgattttgatcatttttctatcataaaatatccaaaacccgaatcaatatttgtggaaccttacttgccagtgcacttattgcggttttccttttccatcccttaaaacatgaaaatcaccaacgcttcaatcccccccaacgaacgcttcaacccttaaagcactcgcgaacgaacgcttcagcgatcgtaaacaacaccgaaatgcgccaccagggagctttggcttggcgcacatgtcaaacatcgcgtaaaaaagaagcagcagaatcagaatttttgcatccgttccagacattcactggcagctgcatcatctgcggaaaatagtgcacttttcgtagatcttttcctctggtgggaaacttaccgagctgaggtgcattgtgataaattgtgtgatagtgagcaagttggggggaaaagtccaggtgtcgaaaatcgtccctcaagcaatgagtttgcccagcgcggaagatccggaattcgtaccgaaataaagtgtgttactctgactagtggactctctgaggggccgttctggtgaatgtgctggttgcattcgagatgggttcctgggcagaatccggcgggacgaactctccggccgtctatcggatgaagacggaacggaaactggtcgtctattacgtgtttgtttacgtcttctgtctgcagatcattacgacaaatactcgcacttcgaccctgtggaagttgaattcggaacagggcaagattgtgagcgttccggccggtggcggaggtgctactggaagggacgattccggatacggtgaggatgatctatccgccagggccgattccttacacccggaggaactggaggaggacgaggagtccacgtttaccatcataacgtcgacggcggccaactatcggcacaacacgtggaatcggggcgagggcacgacggaggaactgctgcgacgactggcagaggaacccaatgaagcgtaccttgcggcagcaaagtcatccatcaaaagtggaaatggaagtagcagcagcggcagcagtggcaccaacagtggtcctcctgtttcttcgcctcaatcgtctagtcccgtgtcgcagccagctagtcccccggaggatttgctaacctgtggcaaaccggtcaattttacccactacgacgatctggtgggcgtggctcagcgctacgaacacaacctcgctccggaaccggaagtggcgtatctgttcctgaaacggaagaccggaggccaatcgttggagcacttcaatatcgacgccctggaaaggcggttgcgccgggccaagaaggaacaaccgcacacgatccagctgtggaaccagatcgggaacttttggcgcatcaagggagatgccggccatgcgatcgagtgcttccggcgtgctctgtccatctcgcccaccaatgcggacacgttgctcaacctggcgcgggtactgttcaatctgcagtacctggacgatgcgatcagtttgacaaagcgatcgctggaggtgcacccgccggaccggagcgcctggaggcagtactttacgctgggggagattttcaaagcgtacggccagctgtcggactcgatactgcacctgaagcaggcgttggcgttgcatccgcactacgaaccgatccgacggctgattgccgaaacggagaagatcgagttcgcgtccaacacgacccggatgcagttctacaccggactgatcatcgtggtgctgtccctagtggtgctgctaatggtgacggtcatgctcaaggccaggacttcgaaccacgggcactgcggaggatcatccctcagtatcgccaacctggccaatggcgacggtggaagagacgacggcgatggcgacaccaacaacaacaataaccacccaaatggtcggttgggacccatcatcaatgggttctcgttggcaagcttccggccggccaagcacttcaaccgggctcaggcgatgcgttccttacgaagtgtggcctttcgctcatttcgaccgttccgttatcgtaagtaagtaaaagggcgcaacaaagccactccctatcgctataatattggataaccgaaagaagcacacttacaaatacggaagaaatacacacaaagctattacttaggcattagtgagtggaaataatgcgaaactgcgctaaataactgaacaaaaaactatttattatttactatacgattgaaagtaacagcactcgtatcattatcaaagaaatcagagctgaaaggcagcagctaacaaagtcgcattcgcgtgttagttttagaggaaaaccgaaaccaagtcacaaaaggaaaactcagaatactccctttttattagaggtatgacttagattttaagcgcatcgagccggagttacggccgctccacatacaagacgagacatacacacagaatcctaaaattgcgcgcttcgttctagccggtttgtgttttgtcgccactactaagagaactgagtcggatttacttaacttaccttacttatacttacgtaatttaccccaaaaaacgaataacttcagtggaagttttcatttcaaacgtgaatggatttagtgctaggatttgatgttcaagtgcgtgccatcggcacccactatacggttgtgtaacgttcggttctccattttcgacttaaatgtgggtagaaatttgttcgtagccatcggtgaaattcagcttccttaactttaacccgtttgcgtaaattgtatgtgataacgaatatatcctttttgaactgctagagagctaccttttacctattggcgctggtactcccaggagtggagcgcaattttaatgatttgttttagaaatcgtttcctatatatgattgtagcttttgttccgcttattatgattattatttttgtcgcttagtattagagtgagagcacaaattttgttgcgtttatttttcgaatggaaattctcgaattttactttaagaactgcgtttttttttctcggtgaacaaaatcgaatttaggtagattctagtggtaaaaaagtgagttctgctgaaattgattgaaataaacatgaatcaactaaactgaa

SEQ ID NO: 1138 - DNA, 1734 bp, Aedes aegypti
tagaaaaatcaaaaaccaaatttgataaatttgcgaataaaaataattaattgtcctaaacgtgtttagattgattttagatagcaaaaaatgatacatagatcgaaaaaaatgggtggtagaggtttaagtagaagaatttttatagatttgttttactataatcagtaaatgtgctaacaacggccccctctgggccgctacgtccactctccagccacaaacaatggccccatttacgacaaaagtgattcaattataaagagcactcatattcatggttaaccactttcttctctcttctcctttgcaggtaatggtccaagcggaatatcgctttcctacatgttggcaggcaattggccatattggtcagcagacaaaatccagaggcatccggacgagttgctgagggcacgactgaactactacgattcgcaaaagagtctggtagagcatgacctcttcagtctagcggatggactagaaggtcgcagcacaaacccagtgtcactgttgctggacagcctgcagcatccttgcgctgaccttgggatggatttaccctgcatggtggaatacaaataccacccggagaaggaaatcgaccatcttgttctgggtcgtggtcctccgggtggctcctggcaccgaatggatcccaacctgcgcaccctttcgctagccgcgtggatgtccctgcctggattagccttctccgagtgggaacacagcagcagcaaaaacagtaacaacaataacaacacgaccgtggaaaatcaaaacttcctacggcagcagaataacagcattgcgtatgaagaacgcaacggtaaagtcaacatcaaactatgcccaccgaggcgcaacctgtcgctgaagcggcaactttcgaaggaggtggaaacgagggcactgatctcacgtgtcgcgcaatactacgccagctacgtggacgagatgaatctggccaaattcgatcgcttaaccaacaaacaattcacggtggtatgcaagaacttggtgatggcaaacggagcctcggatctagccaaccggttgggcgtcaagggcgaaggtctcgagatgccttgggtgacctacgagctgccccagttggagcatgcgctggaaaagatcgacgacgaggcacggtcccagttgaaaccggtgctgattgtgggcgcaggactgagtgccgcggatgctgttaccatttgtcggtcatctggcatcccggtaattcacgtgtaccgcaaccgaacggctggcctggataagatgttaccgggtaacgtttaccctgagtatcacgaggtgcataagatgatgaaggactcgaaccggaagtacgatttgtacacacctttgcccgagcatacgattgcagacctgacgcagacggtgagcattatcgtgcaacatttgaagacgggcgaaaagcgcgaactagaagtgtccttctgtgctatactaatcggatcgcgtcccgatctcagattcatagcaggacttacaaagggatcatcaacgatgcaccatgatccaaccaaaccgatagactgtaaaagtaacccaatcgatgtagacaagtataccaacgctgtgcttcggtccccttacaagggattgtatgcgatgggcccattggttggcgataattttgttcgattcatccccggaggagcactcagcattacatcggcgctgcataaactgaccgagaacgattga

SEQ ID NO: 1139 - DNA, 2199 bp, Aedes aegypti
atggacggctatcacgtacaggctcaggacggcagcaacaacacaaacacctattcctatcaccaccatcaacagcagcagtcccagcagcagcatcaccatcatcaccaccatcaacagcagcagcagcagcatcatcagcaaaagtacagtcatcagaatcatcacttgcatcggcaccacagcaacaactccaacaacagctacacgacactgaattatgccgcctcggatgcgggcttcgtatcgccaccgccttcgccccgttccaacagttcgctagcttcctgttcgtcttcatcgtactcgtcagcttcctcgtcttcagccgtatcgtcggctgcgtctacatcgtccggactgtcatcggctgggtccgagaatggatcttcatacgaaaatctggacaattcagctcaacggctagcagtgctgtcgttcgagcaggtcaaaaagctgaacgatgtgatgaacgaacccgttgccatccacggtcgtggaaacttcccgaccctggaggtcaagctgaccgatctggtgaacatcgtgcgggagaagttggaggccgacattggatccggtggggccggtatgatcgtgaaggatattcgcctgaatggaggcgccgctagtcacgtgctggcttcagaagcacagccatacaatgatctggatttgatttttgctgtggagtttagctcaaaccgacactttgatcgtgtcaagtctgctgttttgtcgtcgcttttggacctgttaccagagggtgtagtcaggcggaggataacgcagtgttcgctcaaagaagcctacgttggcaagatggtgaaggtgaacaacaacaacgatggtgatcgctggagtctgatctcgctgggcaactccccagggcacaagaacgtcgagctgaagtttgtcgatacgatgcgtcgacagttcgagtttagcgtcgactcgttccagattgtgctggactcgttgctgctgttctacgactgtactgagaggcccatgatcacggagaatttctacccatccgtcgttggagagtcggtgtacggcgatttccaggaagctctataccatttgcagaagaagctgatatcgacgaggcaaccggaggaaatccggggaggaggactgctcaagtattgcaacttgttggtgagaaactatattccagttgatcaacagaagatcaaaacgctggagcgttacatgtgctcacggttcttcatcgactttccggacattgatcagcagaaaatcaagctggaaagctacttgaggaaccacttttggggtgaggtggaagaacatctacagtaccagtacctgatgcatttatacgatgttgtcgaacagagcacagtctgtcttatgggtcacgagcgtcgtcaaacgctgatgttgatcgaatcgctggccatgcaggtactctaccgtgaccatcctcaaaatccacagacaaccatcattacaaccacgagtacggtaccgcagcacaccgcaatgtcgctgcaaccacttcagactcaactctcacaactgagcttacagcctcaacaactctcaccagttcagcagactgtcatccaccaccaccatccgcagggtgtgccacagacgcaaaccctacagctccagcatccacaggccatcatgcaacagcagtctcctcagcctggacaagctcaaccgcagcagcaaaccatctcgcttgctccacaaccagccggtctactctacgccaacggaatctactacgctccagtcatcccgacgacgctctgcacgtgcaacgccacgtggctgacgacgtgatcggcgcttacggaacccgataacagcaacaacaacatcaactgtaccaatccggcggcaccactactagtgggatcaatcatcagcgtcaccactacaccgatcgtggccacgttcgaaccgcagtcgcatgcaacgtcaccgtcgacgacgtcatcgtccatctgctgcagtagcaactcctacaacagcaacaacatttacaatgcagacaacagcagcaacaatcgttactttactaatattttagtgtcggatagatgattactagaacagtaagcatgatacacgttttcctctccacagctcaacagattcaaaccatgtaaaccacacagaacactaacacaaattgcgtccgttcgaaatcaactg

SEQ ID NO: 1140 - DNA, 2822 bp, Aedes aegypti
ctccatcgtatcgaaaacgagattgtgcagattttccgttttttaattatcgcgttacggcgcgtgtcgagtccggaaaacggtgttccagtgtagtggaaaacggttccacctgggaatcgccagaaactagtgaaggggaccgattttcgaagtgagggggataaaagaaatttttctcctcgagtttcggccggacgcaaaggaagcagggagcaaaacgcgttcctctggtcagccaaaagaagcgcccatcgcaataacagcagtagccccactgggtggaagagaaaaaaaagggcattcgaagggggccccgtgtgttttctatcaatcgaatatggaagtgttttgatgtgaatgctggagtagcccttacggtaaccattcctgcgccagatcaccagagcacccaaaagtctggactgaaacaggaagacactttccatttccagagtgggattgtcgtgacggaatccggacttgagttgcaaggagcagcttcagtatcaactatagcactcaaaccctacagcagcaggaagacgagaacagatcatcgagttctctctccatcaacacgggaagtagcgatttctacctccgctagggactcgagggcatgttttccactttcatcggactaatcgatattcaatcatggtgggaggtgccctacattgcacacttctgttcgttgtttagtggctcctttcagttgccggatttcgacatcgaggatctggaagaagcgcttctgaccgatgtcgacaccgagagcgagattgatataaaagtgtacactcgtctgctgccggatctcatcgttgctctgttgaagggttgtgacgcgctcagccagatcgtatcacacatcagtccgagcaactatcagatgttcctgagacgactgtttcgtcaaaaatgtcaggaatataacatcaataaccctttcaacgaggatacagattttgaaaagctgccgcttcgtaccaagatcttgattttaaaatatctatgtgactttcgccttgactcagttgacgtatacagcagctttgcaaatcttgaagctgacagtttacgcgtggaaccattaggctacgatagtaaaggatctgcctactggtacttttttggcactagactctaccgtgaggatttcgacgttccttccggcaagggtagcaaatcgtcaaagcgatccgtttggcaagtgatttgcttcaccgaggaagattggagtaatttagctggcaagttcaagcattcaaaaaacgaaaacgagcgagcattattgctgcagttggaggaaaatttccttccaaatataccaaaaatcttccgcgataaagaacgcgagcgaagaaagaagctactagagcgccgtacatcatctcgcatcaaaatctgcgaagaacgccgtctggctgaattattccgtcagaaggaaattgaagaagcccacaacgccctgcttaaagaacagcgtaggcttaaggcaaagtgcgaacccaaaccggaggtctgtcgatcccataaagaaaggctagccgaagacagagctaaacgcgccgaacgacggtcacgttcgaattcggtctcaagtatagtatcaacctatgccagctcgccagaaccagaacctctcacaagtgattttatttttcagccaaaagaaaacgaaagtcaattttttagtaaacattcttctggcggtataaagcacaccgcaaccgtaatcgttagtaatccaccagcttccccatcttcagagctaggttccgagccgacttcttgtgcagacattgatgtgtgctcgggcactttcaagcacaacccggggcaagtgttagaagaaaataacgaagcaaacgacgacgaagaagaagacgaagaggacagtgcaagtgtgatagtcgttgatcaggtgaacaataattttatcgaagtaggatcgagtatcagtgttgttagtggttctactactaccagcagtggaatcagcagtcgtgagcaacgtgataagacactttcgccacctccaacgccccctccactgtctttgttgcaaccagtggaagaaacctcacagtcagcggaaccagtgaaacgaagatccaaacttagtgctgagatcgaagggttgctgcaatacaacagaaatatggctccaactacgaccaaactgcccgggaggcaaaccaacaattcgttgtcgtcagttaccggcccggtgatcctaccgttcgccgaaactccgccgaaaaccacgactggtggaagttcgggtagcaaaagtggtgactccaatgccggtactggcggcggtgcaaccggcaccagtggaaggaagaaaaagagcaaagcttcggaagtgtgagtttttatagaagtgtaattgtttttttggcattttgcctccatttgttcatataagtgtgcttggcttacaactagtttttgaaccttaattttgtctaactcaaagtagatatgttctagctaggagctaatatttttttatactttttgatttttaacacaatcgtttattacatatgatttatcacctatttcagcctttcttaattgccttgatcgttccgttgtgacgtacaatggcagtgtgctataaatacatatcagtcccttgtgcttttttgtcatttttgagatcacctattaaaatgagtgtaaatttctgtatcataagaaaattcctcgtgctcgttccaacaagttctagaaaatttctctcttgctctttcccacgttactgacaaataccgtaaaatggggggttttaagggattgaactt

SEQ ID NO: 1141 - DNA, 1542 bp, Aedes aegypti
accagctgcacccctaccgcctcagttccgggcactgatgccaccgttcatgtatcgtggcaacggaggcggaggtggaaattctgtaacgccgccaccttcttcgaacgaggatatcaatcgtggcaatactggaggcggcaatggtggaagcagtggaggtggaatgcgaagcaacaacagcaacatgggctacaacagcatgttgccaagctttgtggctcctccaacgaatcatcatcaatctcatggatcaaattattcgccaacacagtcgggtggtagataccgagactcgtattcaggcggacgccgtggacagatgcaaccgcctcgtcttgccaacaggcaacagcagcatcaaaacgatgatcatcgctctcaaacggctgctccagcttatgttgaaccggacatacttgtgcagcgaccgattatacgagatgaagaacttcaacgcattgaagcgattgctaaagacgaaggatgggccaaggatgatgaaattgattataaccagaaattacaattctcggatgacgaattggaaccaagtcccccaaaagaaattccaatgtccgttgttaagcaagagaaatccccttcacagatacaacagcaacaacagcaaatgcaacagcaacaattgcagcagcagcagtctcaacaggaagatgacaaacgaatggcttggagtcgagaagtggaacgggaacaagagaggcttgaacaggaacaaattgaacgtcttgatcgtgagcgccaggaaaaagaaagagagcagacgaatatgcgtccagtgcaacaaaatgggcatataggaggacgaggcttagatgcggaagcgaaggaaagattgaagcaacgtcgagaagaagatcagaaacgagaaatggaacggaaacaagcggccgcaagaaagctgcaagaacttgaacaaaagttaagtcagaagaagaacgaagacaacgttgttggttctgttacttcacctgcaactacgaaagatggcgaagatcgtgatctagtagtggcaggttttaacgaatctggtgaaagtaaggaacgcagcagttcaagtgttcgtggcggagaccgagaaagactagattcgaaagaatatagagaccgcgatcgagatcgttttgaatatggacgatatgatagagattaccgcgatcgggacagaggagagcgggataggacagagcgagatagaacagaaagagctagaggcgaacaggatcgtgagcgtgatgcttggggtgaagtaccgccctactctaaaaatttccagtccaatttaccgccacgttttcagaaacgtaaacttgaacgaaatccatcgggaaatagtttacagggaagtggaagctacattactagagatcagaacatcactcgcaacagtagcactgccaatcaaggatcgatgatgtcgcagtcacaaccacaaactgagaacaaaagtgttccgttcgctcaacagtatgatccacgattcatccatagccaacaaaattttggcaagagtcaatcatc

SEQ ID NO: 1142 - DNA, 441 bp, Aedes aegypti
atggatccagggtcatcgacggtacaaccaccagctgcagtagtaccactgcagcaacagcagcttcaactacaacaaccgcaatcccaattggaggaccatcagcagcgacagactccggaggaagcacagacggacgagcccagcagcagcaagacgggaggcctcgttcaagggagaacaaaacgagtgcgcaagatgcgaatggaggtggactggacgctgctgctattgccaccgtcaccgaaaggccgccgcaagaagcggaaaccaggacctaaagctaagccgggtccagcggaacaggtgaagcagaagaaaaagaagagcgaacaaggaccgctgcctcaggaagagacgtcgatggaatcaaaggaaaagcgaccgaagaagcgaaagcagcaacttgtgcagcagaaggaggatgaagagaaagcctaa

SEQ ID NO: 1143 - DNA, 1700 bp, Aedes aegypti
cggaagttcgacaacaacacgaagaagtttgctttcctgtcccaacccacgataccggactacaggccccaagcggtaactaacattatcgaaaagagtcagaagacctcaacgaaccagagtacaaagtttcaccagctgcaggcaatcttcggtcagcatcagacggccaaccacaaggacattgccaacctgcagaacaacctgctgagcaactcgaggaacagctcgcggaacagttccctggagaacatcaacctgttgaactcggagaacgagctccgaaaagcgttcaacaaacaggccgaggaaatcaagagtctacgaaagtccctcaacaattccgagaaacgagtgcgggagctagaagcggaagtcaaacggttacagctccaacagaagcattagaatcgataaccacgtggtagatgaaatagtccgtaaccgctacggataattcaacttagtaatacttacactattaatcctcaattactgaacaatacacttaccactttatatacatattttcgtcgctctccaaaaccgcaattgcttaatccgctaccactaaacttgtacaaccatttcaatacgaagcaggtaattcgtatttacagataaaaaaagacgacattcattacgattgtatatctacttactacaacagtttagtataatacgtattatgggaacgtcagtctatgttgagcgaaaagagaaaatgcatttccagtaccactgagcatttcatagcgttacaaagaaaattttcgcatctacaggaaaacagtccgataaaagtaaccgataagacttaatcatcaacaaatgtacacttaaacaaccgcattaaaaccagaggaatcaacataacaaccaatatcaatagcaaaacatggccaacataaacactcccaaactaagacagagtgggtgcgctatgcttttttgattcaactatgcgagatttttgtttcaatcaactgccgtgcgcttaatgtggcttgtaattgcagcataccatttgggaatgcttggaaccggtacccatattatcaattgtgaatggaaagcaaacaaccaatttgggaacgcagaggaaaaaaaaagcaaaagacatgtgatttgtgatttactaagaatagtgagtaatgtaaacgcagtagcaaatgagaaaaaaaacaagccgtcaaataataatataaatgtagcttaagactagtggatagcgttgtaagcgtatatatatttttaagaaacctatttgtaagtaaaataaaaatgaaacaaacgcaaagacaaagtcgggtaagaagaatcgaaagaagatcgccacacatacaaaagcaaaaagttacaaatagcaaatgcggacaaataagaacaaacaacacacacaagaagactagttaccacgcatacaaacccacgtcaacagaaaaaggggtggaacaaagaatagaacattagtaatcgaacgctcacatgacacaaaaacccagcttcaagattggaaccaggagagtattatgatcgatgtatttgcggattcaaagtgctatgtgattttagttgtccatggtttttaggtcgatgtgcgcaagttgagttgtaagaattgatcgttttattgaacaaattcgttttctcagcccttcagtgtaggattaagtttgatattttgtttttattgtctc

SEQ ID NO: 1144 - DNA, 2593 bp, Aedes aegypti
cgaaaaggacaggctctgagtgaaatcgggtgtgcgcgcctgccatcagcgccagacaggcttggcctctcctcgctttgaagaccttcgagtcgtgtccgttcgagtgtgcttgtgtgtgagagtgtgaccaccaccgaattgtgttcgtggacgttttgtaaggatttccgattcatcttcagccaggacaaccatcaacatcatcatcaaccacaatggaggaagtttatctgtatctctacatggaatgcaaactgagaaagcgcgaagaatcgtccgtgagtccagtgacggcgaccaacgtggaagctgcgccaccgtcgtcgaaccacaataatcatcataatcatcatcagaacaacaacagcagcagcaccaacaaccatcatcacagcaatcatcatagcagtagtaataaccacagcagtcagctggagaacggctactccgtgccaactccggtggcgttccggcaaagcccgtccagtgtgtgggtgtttcctccgctaccgccgcagcctaacctgtaccactacaacgccaatagtcaagacgcgttagtacacaacgagaagaccggcttcaagggactgaagcgacaactgtcgggccgcttcaagcggttggtgtcgcgaaaatcgcacgaacccgccccggcgataccgcccgagctgaagccccagctgaagaccatctacgtttattaataataacacaaaacacaaaaagagaagcaccagcagacgtttactaagctactataacactttactttaagaggacggatatttgtagacagtactaactatattagagatcagttcatttttttttcgatttatttcgagtaggagcgtactgctaattgtgagattagtgttcgaggtttctatcctgggatttttttttttgattttatgttcaagattgagaacgattgagaggaagagttcatgagagtgagaataagtgatagattttcttatacgagcgatagggacccattttttccaggatgtcaaatttcctatgaccaagatttcaaatttttgtaccacgaagaaaaaacgaaggttgatattaaaatcagattttttttatgagaagaatgttttccgcttgtactcttcacagttttcggaggctccaacgccaaccacacacgattgatattgatccgccattccagtttgtcgatttttgtagggagtgactagcccgtctagtgcactaatgtccaggagaaccgcgaagcttaacgatacagaagtaattattattattagtaaacctagaagaagactgacacacacatgaaatccattttttgttttgttaggcatgcgaagggacaacgttaacatataacatacatacaaacacaaatgagaggagagccaatcgcgctcagccgctctgaaggctcccttctttcagagactggattcgagcgtctgtgttaaacactttcatgtagttctgctagatttctgtatttttttcctataccaaccacaaagaacagaaagtatttccatcttttctactctttaatttaacgtagcgaaatatgttttcattagaaaagaatgcttcaacataactaaattagataaaaaaaaagaaaacgaatcaaaataaaagcaatacaagcaaatttttctagtgtattaaaagcatggacagcagaacgaacacagcctcacggcacctaacgctagcgaaagatatttattattttatcgtgtagtcaatcagctccactcccattttgtgtttaggcagctcaaaatacttagaaacaacccatcaaaactgcattcaaagccgaaaacgacaattatattgatgattatgatgatgatgatgattataattcttaaaatgcgcacacttccaccttaatgaactaaattcaggacaaaccatgcgcaaagaacaaaggaaacacattgtgtaacatagtagctaaagaaaatcaagaaaaattcctgcgttgcttagagatcccaacaaaacgcgccattttgttgtgttgaaacgtcaacacacgaacacacaggaaaacaaaaaaaaatctgagatgaaaataggctatttaggtgattgtaggcgaagaaacattaagaagaaaactcggagagcaggaaagttcactcacattgagtgccgccaaaactgaaaactgaatccccacacaaacacaccattagcaacacggaaaaacaaacacccccacaaacatacaagcacacagtttcacagaggcagagagagagagtaacaccaggaagaaggccacggagaaagtcatcaccgcccttctcggcgggtcgcagttcccggggtgggaccgacacaatagagtcccgccaagcctcaaggatcaggtgacccgcgggagggtttgggaaagggtgatgggttgcagctggcacagtggcaccacgcgatagccgtagtgcagaggaagagactcggtgtactttggggtgtgcaagatttactgcaagaaaatcaacaagaacaacagctaacagggcagaatacagttgtacggaaattgtaatttaaataaatgcgataattt

SEQ ID NO: 1145 - DNA, 7041 bp, Aedes aegypti
cgaattaataaataaataattcaatatgagcaaaacgtcattcgaaacatattgaatcgaaaacgatatgaaaagcaaatgctgagctccaaatcgttgttgaaaagtgaccactttcgacgtgtaatatatttcaattgttctcacttcttgcaaattaatcttccaagaattatcgcgaatgttcttttgattcaggtaaatagagattgttgaaaattatgcctatgaaaaaatatacgcttttgagtggcatcagcaccatacgtactttactgcttactaagttatcaccttctcttcaaaattacgttcataaatttagccagcagctgacctgaaacgtcttgtaaaatagtctgcattttatacactgtctgaaaaacttcagttacatagaataagatgcatatagtataagtcataacaatgacgtcatgttgatttattgtgtgacaccaacaccatacattcctattcccacctagtagtttcactcttgtcattattgtgcgctgtcaaattgtacaaaagatattgtcaacataaaaaagacttgaatgtatcaatttcttcatgtatagcattcattctcttcggtagttttgatcgtatgcacttatgcactacaggatcgcgtaatatctaggtgattgcggatcgaaaaatgaagtcgatgttagcttcattggccgtcaggatatagttttgctggtgcttgatactgcgagcgtatcgaatagctttcatagttgaagttttaaaatcctgtaaatgggattgttttggtgtcattatttgagtttgaaaggcaaggaataaaagaggagaaacctcaacaaaattgtgcgaatttaagtacgaatagtaagatatttttttttgatctgtgtttctgtggaatgaacatgaagaagttaatggtcacaagttgccaaaaataacacaaaaatacgatcccaagatgtagtatgtataaaatcagtgatagcgaaggtgaaaaatatctttatctggcctcacacatatagctgcaaaggggctctgtctgcttcattgtacgacattcaatgactaacgtaaatatgaagcatgaaataatgacatcagtcgcaaacctcttttgggcacagtagaaagtgcacaaaaatttggaacatgtagttacgtttcgacagtattcaccagcaatggatctaattaaggaagtgaagtgcaatatcgataaaagtttggaaggaaattctgctgaaatggaatgtgaagccgagcccgaaaaaaatgatctcagtccagaaaattcaaaaaagagtgataactctccattggatgaccgaatttccaagccagttgaagaaaaagatgatggagaagaggcgaaaatgcaatataacaacggtagtttcaatagcggaataagtgataatagtaatgtaaataaaagcatctcgatgcaagaaattgaaaaaagccaacgcagtgtcagtgaagatccggatgttcgtaatgcacttgcttttacgattgaattcagtgaaggccgtaagtcagttgacactcagcgacatgagaaaatgctggagcggttccagaacagacacaaacggggagtttccttgtcaaaattagaaagtggggtaaatactccggtgggaaaaatgaggacccctcaaagtgttaatttacctaggaaaaatcgaattgaacaaccagaaattcaagataccgcagttagattacgagataaaagcagaacgtcgagagactctgtaaccaaacgacacagttggagtcctcgatcaagtatgacggaagcaggtgttaaagattcagcaatgaaaatgaaaactaataaatttactccaaagtcgtcggcgttgcagatggcatttgatcagcagaatattatgaaggattcttgctcaagttctgaattcaatgccgagagtctggattcatcaataggtcttccttgcgttcagcctcctctggaaaatttcaagaaggaaaacgaagatgacgatagcattagtgaagctggaacatatacactggacggagataattatactgaggaacaaaaagaacggatgaatattgatcgcatgccagcatttacaccagagtccactcccaaaccattgttcaaacaaggatctaataaattgtatccccagaggccaactagttttcgagaagaattagaaataatagatttggatcgaccatgttctggaacatcagaaaatgagcgacgaaaaaataatgttctcgaggttgtatactttcacgaaccatcgccggttgcgcaagtttcgaagcctaaacaatcatatctggaaaaactgaagtcacgtgttaagaacatcactcacaaagcgaaatctcccgacaaacaaatcgtttcacagcagattaattcaccagatcaaggaacattcacctctgtaaccactagtggaatattgagtgtaaaaccaacactcgaaagtcatccacggatccatcgccgcaacagtttaaccaaatctcacatcgatagctccgaatatgttcaaggtgtagctaaactaaacattcataaaaatgaagatgaagccaaaattcttaattgttacactgattcagaaaaagccactggactatcagatttgaacgtaaattatgaccaccaaaggcgtaaagctgattcggaagcttccaatataggatctgcggttaacaagaaagattggatacaagaatgggcaaaaaatgctcgagaatatgctaaaaaaccaactcctagtagcagtaatccgcaaatggtgagaagttatgagtttgaaaaccgaaatcagtttggctacgatttcgatatagatatgacgaaaagtgattattacgatacaaaaaagtatcaagaatttggtgacaatctagatcgccagcatttgcaccgaaagcaactggaccgacttttgaacaacagcagcaatagcgacccaatgctaaagcaagcttacggtactgattccagtgcaccaaattcgggtgaatttaccagacgtggaagtatcagacagtatacgagccccactgcagcaaaacctccaatgagtccaagtaaaataccgtccccaatgggttccatcggtagagctagaagcgttagtagaaaccgcagtctgcaaggaagtaattcggacctttcaacgaacgaaaccgaaatgtatctccagaagaccgctgctgcaataactactttgcagaaccttcaaaggcgaaactcgttacgcaattcatcacgacaaaactcgtcacactcaagtccacttagtcctgcatcacggcgaatgtctccgaagatttccccgatgaactcactacagtctccaatgcagtcacctcatcgggaaaagattcttcacgctgaaggaggtcaaacttatctaccacatcaccagcagatacttactcttaaacaacaacaaaatatgttgaaccataaacgaaacctttctctggatggttcggaatcctatgctagcgcgttagctgcttttgggtatgggaaccaaatgtcgaacagtctcaactcagagcacatgaatgcaatattagatttaaggaagcaacacactcggcacaactccttcgaaggaatgtcttctcttccaccaaaacccgtgaaatgttttcaaaattttgaccaaaggactgcttactactgtacaaaagaccggaacgaagatgttcctgggaatgacatggccgattacgatgacgatgaaaaactgattgtgattacttctggagtaaaggacatgtccttgggcactaagaaaccaaatgcagtattgattaaacagcaatcatcatcatcatccagtgtaaaacccaccggagcacaaattagaccaacaggtagtcaaccagtaaataaatcatacaatccaaaaccggtgccaactcaaatatcatcacccattaaaagatctagttcattctctgtcaaggcaatgaagccaatgacaccaacattaacgcccaaattaggctccaaaatagcatcaggtggttcaagaatccagaaatcggctagtagcactagttttaaaaagatggttgccaattataatgacgaagatgatttttatattaacgacgatgatgaccttgaattaggtccagaatattcatctagctcagaaattagcgataaggacgaagaaggggctgatgtggataaagaacccatcaccaacactagatataacaaaaccttcctcatgcgtatggaacagaataagaagattgctgccggagtcaaacacggagtggcagcttgcccaaacactcctgaattaccacgccgaacacttcaagttaagggaagcactcgcgatcgagcatcaatgccaagagattcaagtcttaatcgaatgaaacaagatatggctgcttctcgcaaatcgatgggcagagaatcggtgccgaaagaaccggcaacaggtgggaagcaaaaagttcagccaaagtatttggatatatcaaagtataaaaacccgacggcgggaacctttttgaaaaaggatgaatcgaaaagctatttgatcaaatctgaagtgaagaaaagtcctagtagtgcggcagtagctatgaacagggcagaaccaagcagaatgagtactagaagtatcaaatcagcaggagcaaaaccaactccatctaatcaaaaagtaaccaaggagcaagaactggaaatgtggcgtcggcgggctagctatgatccgatgaaagctgccatggagggcaagaaaaagcaagaagaggcccgtcgtcacgttcagaatcaagcagaacgatcaagtaaatcgtgtgaaagctccgtattgaggtctcaatcatgccacagtggcgtaggagttggaacaggtcgcttgtactccagcaatataagtaacaataccaatgcgaatataaaaggaattttcgatcaaactgataacaacagcaacagcagtcaaccgagtaatcactggacgctaacatcaaccgaatcgagtgacgatttcgacgatgaatacaataactgagtaattcccccacgaatggattttgttttcaaaaatctaatgactgcacaataatatttaaatattatattcactgaatgcttgaaagtgttatttgcaggagaatggaccaaaaataatacgcggttcaaccatggttcgcactatgtggcaattcgatagcgatgttttattatttttaccagaaaccgtattaattttggtacattaccccaaagaacactttgaacgagaaaaagtatttcatcacatattaatccttcaaaaatgtcatacaggaaaaaaaaaatgatttcgaatatttaatgtataatgatgaagtatttaatcttttacaattatcaaagtaagcattcaaggcagcttgtatttctacgcatatgtaatgatatcgtaggcaaataaaaacaaaatcttagcgatatcgaaaagtcatacgcaatatctttactcctaaagcatatgcatgaatttcagttcatacataaaatgagcttcttatattaaattgatctatttgattatcgattgtatgcttaaagcaaacttttgtcgccttattgtcagcctctcttactagatttatttcaaattttattggtgtaactttcaattgatactgttgagatctgttaactgcattgctatccgaatatataacgtaacttttgcgaacgagctaggttaaatatgactgtactttctttgttattgtggacattgtctgatgtgattagaacgacgtattaaataccctcatgttataaaatctttattgttaaaattcattttatttactgcatcattaaatcaaatcacataaatctaagtgtcgcatagaaaaaatcgaatggaagatggaagttgcatgtgaaagttgagagaacttgaactgaaatagttacaatgtggttggttaggattagtttaaaattgtagcatcatggccctccattaaagtgtgaaaagaagaaataagtttgatttagcttaataattttccaataccaatttttcaaaatggcataactactcaacaaaggcatctcatgtcactgaaggcagtttttgaccgtggagaggagatttttagcagcttacataaatgtattgctcggttttcaataactagatcatatacgatgcagcttgagctgaatggtgcttaaaaatggatgattttcactgcaaataatcacatgatcttgaaagtcattgatctgatggaaacatatgttgttgtatgttgatcagacatcatgttcttctagagcagatattcatccattcatgttgtttgttgaatattgaacggcatttttcgttactcatgagattaagacttcctcgaacagtgataacgtaaaacaaacatgttttaagagtcggcattgagaacactgccattatatggtcaaaggcaccccacacgttgacatgagcagcttttgttccatggcccttttgaatttaatttgttccattgtaatttgtcattagctaacaattttacatcaatcatttaacgtaaggtgtttatactagttctgtgaagtaaagttattttagtataacattggtaaatttatttagtatccgaatcaatccactaaatacaggtgctcataagactaaacataaaagcggattcggttttggttggcaagtaattccagaaagaagtatattgatgtaaaacattggtagtgggacggatggacttacgtctttaattgtgatttttatcacaattaaagacgtaactatcttaacccatcttaaaaaaaaactcttccaatttctagaatctatgtcaatattgttcattgatcaactggatcctgagatattccgaaattccttgggggattgacacgtagctataacccacgtaaatataccacggtacagaattttcatcgtattcggaacaatacatcaatgagagtatgttgtgaaaaaa

SEQ ID NO: 1146 - DNA, 2582 bp, Aedes aegypti
gaagtaaaaacgtaaagtgagaaacaaacaatcgggacaaacaaaatcaaaggaattaataaaaaaaagttgaggttcgcgcttgccgtgtggacacggacgcgatgtacgataatggtagattgtgggaacgacggaagaacgaatgaagtatcacttcaagcacagtcaaacggacggacggaggcatatacacgcagttgcacttgtatggaaatgaaaattaagaaattgggcaggaatttgcggtacaacattggaattagtttggggaacaaaaatggagggaaagtgtatattgtttgtcgttttgttcacggatagttctctcgcagtcagacgcgtgcgccatcattgttagttgtgattcattcattggattctgatttctgggataaatcagcaccaccgatgtgtgcataatatgttgtggtgattatttaaggtgttactctctttctatgaaccgtgattatttggcttccattttgtatacacaggaaacactcacatacaaagtacatacacttaccgacacattcacactcacattcttaaacaagttgtcacactctatctaactacataggaacgcatatatcaatagccggaggaacccgataaaacacgatcaaaaatgaactagcaaatgctaaatgccgcagcatgatgatttgtgtcagtgtttgaaagaaaaatggccgccggttgaacggcatggacaaaacaccattcacgctaaaaatatccacacaaatgtaagtcgaatcgatttatcaaaggcaaacaacgtttgaatggatattcaacagcaaactgtcacataattctctaccatgtggtcagtgatttgaaaatctattcgagaaaacaagacagtacttgttcaacacttacacatagaaaagaagtgaaaaatgtcgttcattcaaatagaagaaacaatatacaactgtacaagcgaagaaaagtattataaaaaacattcaactgatatcagtagtagatcaaatcgaaaataacattatagacaagccgagtaaaaatcgtatgatgtaaattgaacaagttagattttgtactatttttaacgcagttgtattgaatttttctactgtcatattcggaatccttgcggcacatttgtgaacaaatggttgtagctctagcatcatcttgttctcatcatgtggaactacagtctgaatcatccgaaagcccttctgccgggcttttcggagtgccaaacacatacacacaatcatcagctttctcctctaaactaacactttgaaacacactttcacatctatctcgcgttttgaacttgcctagtgttgttgaataaagaaaacgatttttactcctttaaatcgctcctctcgcgcttgcaaaactcaagtttcgtttgaatagttcgaagcattatttctcttagtatttctacccattccaaagttgttcacttttacactaaactctttacaaattgaaaaaaaaaaaagataattaacagtcgttttagatgaaaaaagaaaacgaaacaaaaatcaataaacatacaaattcaaaagagaaaatagcataatcaaactgaacaaaagagaaaaaaaaaacatcccaagcgagttcgcctttgttcgagttttaataagattaaatagaagaaaaaaaactgcagcataaatttaagccaaatcgtaatcaatcaagcaaagctcgtcatcgtgtcgttgtcgtcgtcatggaaacaagaaaaagaagtaaaaccacaacaaccacttacccgcacttgcccttcgctcccccgtcatcagtttttaatgtgtgcgtgtgggtatcaagtagatagtactcttccaattcacattcgttgtgtaaaactaatgatagtcggagaaacaaagcctctattgtgttggtgtttaaaatagaaatcaaaagcaacaaacagtttaaaacaaattgttgtacaattttaacctttacctccatctgatctccatttttctgtttccgcgcacaatcaagtaggccgaaccgggcatcccataaaatgacagtgactgtcaactgagacacacacatacagaaaccactagcactcactcacacaatcgcataccgcaccgcagatggaatagaaaagtgttgttacattatcgtaattttcattcgagtcgaatgtagagtaactaattttcacccgttagtccacgtggtgatgatgagagaaagactttccaatcctagcttttggtaaacatcgccatcctcccctaaaaaccattaaccaatgccaaccaacaccattaagcgatcgtcataaccaggagagaatcctttgagtagaaaatgaatatacaccctcacatcaacacacccccacaaaacagacgctctcaatcctttagaaaacaaacataaatgaacgttcaagatgaaaacaaattcaaacctacatgcaacatcttcgcaaacggaccgttgaaaaaaaaaacaagaaaaatattactgtgtaaccatgcaaaacaatctattttctaatgaataaaaagtatatatatacaacacgcctttgt

SEQ ID NO: 1147 - DNA, 237 bp, Aedes aegypti
cagctgataaaaacaaaagtgctgcctgtcacgccttcctggggcactctacataacagcagcaaaaatcttggaaaagaaccctcacgcgtcaccgataagcctccaaggcgtttgacagcgcccaccttgcgttcgattcggagaaagttaaccactcgtcgggggaaaatccagcacataacaatgacttcatttgttagaggcgtcaatcactggcaaggcagaagtaactaa

SEQ ID NO: 1148 - DNA, 3196 bp, Aedes aegypti
cccgccccgaagtgcaagcagtgcaagccgaagtgtgtttgtaaaaacagcagcctgtctttgtcattgcaacgcaaaaatctcctttcgtctcgttctcaaaccgaacctactagaaattattgcatcacttcactcttcaaaacagtatgcagcagccaacgaagacggtgcagtgatatcaactccagcccaggatgaattcacgctagaaaaggtttctaattttacattttgtgctaagtagtttgcctgtttaaatatttgatcacggtgttatcgttgaagtcgtgaataaagtgtagaagtgcctcaggaattcggactatttggcgaatactataaacttatcggacgtgacttggtgcgttgcaactaggagtgcttaaacggaatcatgactaaacggacaaacaagatgggatctttcgattgctcgccactgttcacccaagccacggaacggctccgaacgttcttcctccgtggccaggaggttgatctcgattatctccggaaaacgggtattttgacgaaaatatacgacggcaagtcggatgtccacgtcatcaacatcttgggatacgcgctgaataaaccagtcgcgaaatttgatttaccagcggaccagctggagaagatgcttcgaaccggagacatttgtatgtattcgaaagaagccaaagaacagttgcaaaaggttgtgaagcagatggagggttatcgcttcgagctgattccattggtggtggtagcagagtataaggaacataagcttttcgaaacacttttaatcaaggtccacggcttatacaaagtttcatatgttgatatgagtggaagaatctatacaagcttcgaccatttcctcaacaaaaatgtgctgccccatgggattctatgttatccgaaggatggaaaggttgtctttaatgaccggaacgagttgcttgttgattaccaagaggttggacttgccaattcaaagaagatgaatgcggacttattggttggccttcttggtactgctggaactgtaggttcaattttcgcgaccggaggtttggctgcgccgttcatatggctgtcttgcggttcagccctgtacggaacgggtcgttgtgttgagaaactgatcgatgccagcgaccacggcctgtcggtgaacccttgcgagagtgccgaagcgcgcaacaattggctgatgatgtccgccaatctgctgacgtttgcttcctttggtgctgccgctggattggccactgccacaaagatggaaggtgtcaccgttcagcagctgggccgcatcatgattggcagtcggataattcgtggcgttagtgcgggggtgaatgccataacggttctcgactcgattgtctacacggccatcaactggcaccggatgtcgatctatgagaaaatgtctctggctagtgccgtatgcttctgtttcagggaggtcattagctttgccaacgcggaacgtctgatccgagctagccaaatcgaaggattgtgtacgttcttcaagagttgtgctatttcggccgtgggagatgtaggaatgaaagatatgtccaacatcggccaaaggttcgtgacccaggtgaagaagactttcgaagacaacgaagagtatgtggccacggcgatggaactggttcgtacgcttgtgctggacaacttccaaatttccgtcagcgatgactttacattaattaagctgttcggattggagtacaaaatccgaaatataatcagtatgccaaaaaccgagctaaacaagtttttgtacatgattcagggcatagctaatacattcaaagacgcgttttccttgatgcgtaagatgtggggcgatggcccgatagccaaagctgtcttcaagcgagctgaagagaacggaggcgatcgcgctgattatggaaaagcccttaacgagctaatcgaaatattcaatctattgcgcaaaatcagtgacgatattagcattctgacggatgctcagctgaaaattggtggtggacatcattttacaataggaacagcctacgaaacgttcgtcaaaagtggtttgggaaaaggaatttctctccttcgagctctagtggagatgaatcccagagaaattgaacgcatgaacaatctccgcaataaatggggaaacaaagaggccgaaatttttgaatacgtgacgcacaactctgccgacagcgcagaaattctctcaacattacgcttcctattggatgtaaatgaaacttgtacagaaagttttctccacattactgacttgcattcttcggagcagacggtcgagattgaatcaatgatccgcgtcagcatcgatcagtttcgtcaagcggtgaacccagattatctaatgaatccgaaaattcttcacatttgtcatcgagctctggccaatcaccgtaacttcatcgaaagcatctggaagaatacctgtaacagtccagacaccgtagacaaatcgtttgaaaagctcactgtactggaggcagcatttgagtcccgtacggatgctgcaatcgaaaacatcatctcgtacgtttcaaaaatgcagtgttcggatttctccagattcgtgactcactcactttttgcgttagacggcatggattcgctgatccgtgagatgaacctttcggaagaagaggcaaacgatattctgttttcggatctggctcctctacgctctcgtttcctagagcttagcgagaaggcagaggaacattcacttggtggttattacgcagtgggagatcacctgctcaacgctgaagacggagagttaattgcggccatcaaagactcagcctcgaagggagatcttcgattcggaactgtggagaacggtgcgctccatctgggtaagtatccgatgcttcgctttggcaagaaggaacttcaaaaatacaacagattcattgctcagaagaagtttgatcgggaggaagttcaactcgcctacaagggtaagcggttggtactactcgctaatgaacagttgaggatcattgtcggattagtgcaaggagtaggcttctatattgacactttcatgttcgctcacatggattaatacttacctcgattgatttttgtctttttattacacatagggtagcttttttagtatagttttttttactacatgctacactacctacct

SEQ ID NO: 1149 - DNA, 231 bp, Aedes aegypti
gaaaaatcaaaagtattagctgattccactggaagaaaaggccatccggaaatcttgacgtcatcatcgctagcgaaccagcaattcaacgcagcagaaaagatcggtgttcttttggtttccatttgcttattctttgaacgttttcacgagagggctgttttggatcggaatactttctggcatgcgtggaagcgttggttctggacgaagaaacggagaaatttatga

SEQ ID NO: 1150 - DNA, 2524 bp, Aedes aegypti
aaaatccgttggcccgttcgcaagccatttcgtgatatacaaatttttatttatacagaaagatagatatctgtcaagtcaggtttttgctaagattttgccgcctgctcggatcctgcgttagatttggcttagaatactaaagaactccgaaatagtttactacgaccagcctgctatgattttcaatgttcaatatttagttttcaatatccaaaagaatttacaaataaattcgttctatcacttcaaacccattaaagagcttccaatttatgtccttcactcgacctcaatattcccttaactaatcaaattccacgtattctcttctctccacccgaacagcggccctcgcgcaacactcgccaaaccccaaggccctgcccaccaccgagccctgcctgctctgtaaaaagctctactacctattccggcgattctactgacaacatcaccagagctgccagtctgccgtcccgtcggaagaagaggagaatcggtgctggagctggtgcgacaccagcgacagcaacagcaccgataacattagccaaaaacgtgccaggactactgatactactactattactactactaccactacttcaaccactagaaataaccgagagccttcgggtcgtcgtcgtcgtcggaggcggaagccggcggtgcagcagcaaaagcattccgtagaaactgggtcaaggacggcgactggtgctttcacgaccaccagcgacggtgctgccacctcctccgacacggcgggctccgatggaactgttagctgtaagcgtcgtcgtaaatggagcgagttgtgaatttttggtgctattaaattaagcaaaacgcagcgagagagattgggcgaaggaatgattcatccgcattttggcgcgctctctcctcgtcgcacacgtgctctcgttctctttcgccgataatcgaggagtgcgtgtgagccggagcagagcgaatcgtgttgaatcgtgttgctttgatggatctcttgccggcgaacattagaaaagcgtttgtggattttgatcggaaaagatggtgcaagagcagtaggcttcgggttcttcgctgaatccggatcctcgctcgaaccggacgatggctgttgaggatggtttcgtaactaggcaacaaacgcaattacgcaaaacgtcaaatagtttgttgacaattaaatttttggaaacacttttcggagcgaacaaactacgagcaattatacaaactacaattgtaaggagcaaatccctaaaaaaaccctttgtacattaaagcagttattctcgagaccccctctctgtatcgatatactctaagtaagttcatcggaatagctgtgacaaaccaaagcatctgatcaaaagacaaaacaaaaccacgttttcttacgttttttcacccgtagtgcgtaagtctatctctaatcttgtcgcgacaagatccagaacaaattgaactaactatttatacccattatatcgaactgtaacaaagcacagaagataaaagacaaactagtagatgaagctgttagttgtttaagtgaattgacaaacaagaaaaagcatattgtgaccccccactagcgagtaaggcccccatcgatgaaggagcgaaggagaacaagacaaagacaagcgcaattgtgatatcaatgacttcttttttcttaatttttaaagtgcgaaatatttctatacaaaaccacacatacaaaggaaacgaagcactctaggttgccgtctctgcggaggaacaaagttacaacggtaggaatcgaatcgatttaaaaataacaaacggatacaaaacggaaaccgcggctgccgcgtttacccccggatatagagatacactgtaaatatttattttaaaaattgacaaaaaagagtaacgaacgacaagtttaatgtctatatatacctacgaatacatatatttaactatcgacatataaggtttcttctaagtatttttctgcttttgaatattgaatacgcgttccgaaccggagaagaatttaatcgtggtagtgtattggtacaataagatttgtaggtttaagaacataagaacgaaacaaaaaagtcacaaaaagtcaacaatcaacttcaactttcttaacattaacgaatagattttaaaaacacccttatcgagtaaggatttgtgctattttgtaaatcgaactcaatcaaaaatccaacacgacgacgacgtttgtttgtaaataatttatttagagctttcgcccccaagaaaggtgcgaaagtttggcatttgttagaccaaaaactaatgtgaaaaaaaagtttattgcaaaaaaaatcgtaactaatttgtaatgcagtactgtattagtttaattttgcattgattcctcagtttaccattaattgtaatacttttctttgttgcgtacttgaatggaaggatcgaatgagaaggtggtttttgaaataaatcaaaaagagaatggtttcgataaatgacgtaaaaa

SEQ ID NO: 1151 - DNA, 7664 bp, Aedes aegypti
caacagcaacaacaacaacaacaacagcagaaagcagttgatccacaccggtcagtaatccagcagccggttgcagcagctgctgctggatcttccttgaatgcgcttccggaatcgatcgttttacaacatcagcagcagcaacagttggtaaatcacgttgcccaacaacagcctcaacagcaacaggcaatataccatcaacagcaagctgttacacagcagcaacaaccgcaccagaatgtgataaacatgaacaacatctcaaacagtgcctccccgacagtccagcaccagcagcagatcacgacgaaccacgttcagtcgcctcaacagcaacgtacaccttcggcagcgtcgaagcaacaatctcacccggctgtcaacgatcaatctcagttgaagaatggaagcacacctaccctgcagaaccatcagccgtatccgcggtcgcagttcccaacccagcaaacgccacaaccacagcaacacagcatcaatcacatcatcaaaaccccagaagctactccacggaacagcgaataccttcaacagcagcaaagcaaaaatctggacgctcggggacgtccttcaccggcccagggcacaacggctccggaaaccgatcccactcaaaccaatctacggaagcaacaagagcaccaacaagcacaggcagttactcctcctgttcagcgaataaatcaaccaacgccaatggctacgccccctaataagccccgtccaccgggtggcgtccctccgggtggtacaccaacaagtacaccgccaggaccccggccaatatccgttgcaggggcattgcaacgggcagggatgaatgccgcaccgaaaccgattctcacaacaccggtaacgtcaatcgctgtttcaggagccctgatgaagacgccaacaaccaccacaacagccccaacgacgccatcaaattccagtcaacagcaaacgccacagccgcaaacaccccaacagccgccaacccccaataaaactccaatgaaaaagccccaacgagttaacctcaagaaactgtgtcggatgattaccgtggctgaaatagacactttaaacctgaaaaagtgttccgttcgattagagaaacttagtgacgagcacatgacacttatgcaggaggatctgaagaagttctcccaggctgaacccaaactggcgatgcgtttgggacttgtgaagaagagcgctgaaatgatatttagcaaaatgaaggaagacgaaaggagatacactggattactggcgaagcgaaaggcccaggaagatgcgatgaatcccgaggatatgttcagcaaaccgaagctccggaaggtagagaagatggtggtaccagttgtgaagaagttgtccaaggaagaactaatgaacacgaacacttaccagaggtttatgtcgatcatgggtaagatattcgatcagctagatgaaaccgaggcacccaatttggacgatggagatgaacagttcgagtgtattccaaccagcatgctcagtagtattagttcggaggcggcgaaactgaaggcacgcaatgccatcgatgccattccggaaaacaagctaacattgttgattacgtacgctatgcgatcggtgcattcggcaaagaatctcagtgggacggaacttcaggacgacttggtcggggacgagtgcattgagaaaatcttgaatgctatggaagcagctttgctaatttgttcgatctacacatgcaaaagcacaaaattcttgcaggaggataacgtcgatgcgatcatcaagtttgtgcagtttcaactgcgagaaacagtattcccttcgtacgatccagtttactcggttgagacgaaaaagaaaacagacggaaagaagtcgaaaaagatgcctacttaccagcagaaaggtctttcggttttgtacaccaaaattgtcgaactcggcaaacagttggtgaccatgtttgaaaaattccacttcgtcgataccatcgtgatacacgcttcggcattaggcgtggaaccattctttgtggataatatcgaaaccctgcagtttgtgtgtctcgatctggtgacgtcgatttttcaaaacgaaaagtattcacaccaccgacgaaacattgtcgcggacattctttcgtcgattgatcgtcttccgcactcgaaacgcaatctccgcccatacaagctggtcaacaatgccggaaacatccaaatgatgacggctctcgtacttcagttaatccagtgcgccgtcgttctgccggaagctttgggagatagcaaccccaagaaagcaaacaacgaaatcgttaatagcagcaatccaaaatcggctgatctctacatcattgggaagtacgatacggctttgagcattggcggaaacttcctagcaacctttctggataaatgtaaaagtcgatcaagcgaaacggatttccgtcccctattcgagaacttcatacacgatcttttgacaaccgtcaataaaccggaatggccggcttcggaactgctgctcagtctactggggacaatgctggttaaaaagatgtccgacaagggtgtagagcagtcaatccgtgtagtttccctcgaatatcttggtattgtggcagctcgattacggaaagacaccgtagagtctcgatgtaaggtccgaacgatggattcgctgatcaagtacattaaaatcgaacaggaaaaggaaggcgacgagtatctgaaagactcaaaatttcagctggacgaagaagaggaacgaacggagttcttggagaagattcttctggacttcctggcggcaaacgctcaggagggaaacatcgtgtggaatcatgcgaggcacttttacatcacacaatggtatcgggacatcattcaacgtaagaaaaacatcgcggccggcgagaagggatacgcttctagaaaaaagcaagcgaaaaggcggaagaaatataccagcgaatcggaaaactccgacggcggcggaatcgattccgacatcgaacaagtcaagactggggtggatcaggaattgaacagtgaaattttccggctgctggacacccggaaagcaacttacctgtcgcaggtctgtcccttcggtgacaaaaatgccggaataagtgaaatcaaaacctacatcgattatggcaacgcgaatctgatcgcacagtatttggccagtaagcgatcgttttcgcaaagtttcgacaaatatctgcagaaaatcattctggtcgtgcgggaaccggtcgtggcgatacgaacccgggcgatgaaatgcttgggcaacatcgtcgaggtggatcagatggtgcttgcgaggaaggacatgcagatgggcgtccaccaaaaactactcgatacggccatctcggtgcgagaggcggcagtggatttggtgggaaaatacatcctctccgatccggacctgatcgatcagtattacgacatgatttccacgcggatattggacacgggtgtttcggttagaaaacgggtaatcaaaattctacgagacatttgcatcgaatatccagagcaagaaaagattccggacatttgcgtcaaaatgattcgccgggtcaacgacgaggaaggtatccagaagttggtcatggacgtgttcatgacgatgtggttcaatccgtgcaatcctaatgataaggcggcaatggataggaaaattactcaaataatcgatgttgtttgctcatcccatgagactggcactcagggtttcgacgcactgctcaaatcgatttttgaaccaaaagaaaacaaagaggactcgaaggccaagaaggagattccgaagacgttgatcaaagcctgccagcagatcgtggacggcttggtggacgcaaccatgaaactggagagctcggaaaacaagaaactggttggctgtataacggcgctgcatctcttctcgaaaattcaaccgcaactgctggtgaaccacgcgatgacactggaaccatatctgaacatacggtgtcagaatgccatcaactacaagttcatcagtagtgtggcggagattttggaacaggtggtgccgttgatggagcatcccagtgagattttccttgctgatctcgaatcgcatctgatgatgcttatcgtgacgcaaagtcaagcagtggtgctgagttgtgtgtcgtgtctgtcggcggttgtaaataaaattaccaagaattacacattaatacgagactgtttttctaaattttactataagggattagtatctagtaaagagaagttaatctccgatccgtcgatccccatagaacaactgtataggccccagtttaggcgaagtatttatacggtaggattaatcatgcggtattttgacttcaagcagccagaagtttacggcggcgaagatgatgcacaaggagcgttaccggccaatatctgcgaggacgtgtacagcacgctggcattttttctatcgtgtagtcatagtgagatttgcaaggagacgctgctttcgatgggcaacttctgcgtgaaaaactacgaatatctgacgaagcaggaactgcgggactattacaactatctgctaacgcaggacaccgtactgacagagatgaaaattgtcgtcctgaagaacattttaatgtatctaaccgaggaggagaacaaaatggttcgaaacgacaaagaatgggctaagcaagcacaaaccgaagatttgaaagagatgggcgatgtatcgtccggcatggcgagtagggtgattcagatatacctgaaggagatcctgcggagttttctgcaccgggacaccggtgtacgaatgtgggcaatgcgtgtggttgagattgtgctgcggcagggtctggtacatccagtacaaatagttcctttcctaatatgtttaagtacggacccagaaagagaggttgcacatagtgcagaccgtcatctccaggagattgacaagcagtacccaggctttgtaaatatgaaatctcacgccggtttgcagtactcgtacgaattgcaagtcttgttacaaaaacttgacgacagtagtatagtgagaggatacagaatcaaagatcctcaagagccaccgagtgcgctgaacggtttcttgtatactttgttgcgcaataccaaaccgcagcgacgagcgctcgttcaatcaattacaaaacagttcgacgacggtaagatctcactgcagcagatgctctacctagcggacaatctggcctactttccgtacatggtgcaggacgagccactgtatataatccatcatattgatgtactgatatccgttaccggtaccaaccttttggcgacgtttcgagaggggttgaaacctccgcctggagcggagaataacccggaccagcaaccgaatccactggaagatgatgatgacgatgaccaggatgtaattctcagtcggctaccagaggacactacagaactacagaactgcataacttcggcacaaggctgcatgcttttactcatactcaagcagcatttgaaagacatctacggcatcacagattgcaaaatttctcgatactcaccatcggaagcggggaaaatctacgacaaaacaatgcagaggagatcgaactcattgttcgatcccaaggctaccattacgttgctgaaagagaaccgccacataatggcagtccagtcagatgatgaccgagcagagcttgtgcaacgatatctggatttcaaacagttaatgctgcggctcgatccggacgatccagacctcctggatgaggatgatcgtgccgccccgccaaagaattctgaaccgaactcaactgttaccaccccggtgaagcaaggtgatgccaatagtgcgaatcccggtggagacagcgcagctgcaacccccgttagcaacaacgttggcagtagcggtgcgcacgtgaacaatgtcaacagtactgctacttctgccagcagtaatacgacggcagctgtcggcacacggacaccgaaatcttcctcgaggccatcggcaacgaacaacgctgcctccagtcggaaaactctcccatcgcgaagtgctcggaaaaaacgacggaaactatccagttcagaggaagaggaaagtgaaccaagcgatatggattacgactagacacaaacaaaaaacaaaaacttctgccagagacattattaatcgttgaatcagagatgtaaaaattacgtaggatcgagatacacgtttaatataattatttgtggtgtaagaaacaatatcagtggagaatgccaggaaagatgattcgtcatcactttacaaaacaaaataaaagcgtctgtgaatgcacatttaagtagatggtttaaaagtgcgccaatcttagcagtagcaatagtggtagaacttgatcaactcgtagtatttttcttttcctccataaacacgcacgaacactgtttcaagcgtacaccgaaccaaacaccgtcactaggaatgaaacttgcgctttattcataccattaggtacggtcacccaaccttcgattcagatttggaaatgatacgcatttgaattaaaagagaaactttgttttaataattccgtatcggatagattgtccgcagtactatctgtgttctacggtttcggacggaaaactcctcccacagaagtgtgcaataaaaaggcatgagggagcgaatcgtttgtgctgacggtaagtcctggcaaaacatgcatgtttctcaacgtggaaaacgtgttttgaagtaggaagatgttttaattgaaaatatttaaagctaactgtgaataggaaggatgagcggaacaaaattgataccgcagaaaaattgcggatagtttaccaagagggcaaggaaaaaatcgccagattcactgattagagaactttgaattaaaaaataatatttaatttattgaaccagattagaacagcaacgagcatggcgagagagagttataaagagtgcaagcgcgtaacgattaacttaaattttggcaaataatctgcaaaagagactggcgaaaaaatattattactaataagaaggtgaagcaattctttgcttgagaataatcgaacattcaagttctgttactttgtgcgtgtgcgagcgtgctggacccgtgtatgtaattgtatgtatcgagtcaaccaattgtaaatagtttgtaaatatagagaaaatatgttcatttttccctttccgaatgtgaaaagaaagataagacaaacacagtagaaacaaaatcgtttcaagaaaaagaaaacccactgcaaaatttctgcgtgtttcggataaaataaagagacaaaaaagaacaaaaaatatgcaaccgacaacaaggaagagactttatttaaagtgtttttagataaattatttatacgaaaaaagaagctgaaaacgatatagagaacacaacacacacaaaaaagtcgaggaaactggaatccagatgaatttgtaatttaatgtagcgtcgtaagggaaataaaacaacacaaaaagataagaggaaaaaatgtataatcgaaagatcttttttgtttttttttaataatttaaatcaaagtcaaaaaataatgaaaatacaaagtgaaacttgtagataattcaaa

SEQ ID NO: 1152 - DNA, 1704 bp, Aedes aegypti
ttcaattgatcaagtaatatcgtacatgaagagaagcaaaaagcgcagagagaaatcagagttttatctgaacttggcagtttgagtcaaaagaagcacagaaaatcaacaagagagtcgcgaataggaacaagagagtcgccgtctttaaatgagcaaagtacacacaacgttgagttattttgtaaattttatcattatttagtaattaatgccactagtagactcttaacaaattgtcaccaaaagttacaaagtttttgtctgtgaaacatagaagaagaagcaaatcagcagcatcgaacgttctcgtgtgatacaagtgccggaagcaaaagcgcagctgagttcgaaaaacgccatcagtagcagaaaacggcagcagcaaacggcaaaccgcgagaagaaaatcgatgattgtcgaagtcggtgcgagctacatagcggaagaaaatttacaagttatgctctacgcaaagaactgaaacaagtgaaacacaatcctcttcgcaaagtaatggttaggaatttcaaattttgcccgacaagtacacaaagttgaaaatcgttcggagcaacaaccgcaacatcaacacccacaaaatacaaatggaagagtagattatttaatgcaagtaaaaaagtaatatttaaaaaattacaagttaataaaagaaagtgataatcaagtgctgtgaattacaaataattaaatttttatccataagctaaaattaagagttaaaagagagtaaatcaacccctttacgcaaaagacgaaaaagaaaagtggaaaacctcaacaacaagtcaaacaacggaaaaaagtcgaaaagaaaaagtcactcctagcgtagcagaaagaagagaaaaaaaaaatcagttgcacatcgcgaacgaggcaccagtggacgcaaatatccccttgtatttatgagtgcgaatttcgctgccatcgacgatctggttgaagagtttctgaaaatggaactcatttccgttcctccatatccaggccaattgggttatctaggatcaaacaaagtcaacgatttccgaacaccgttgatgccgataccggcaaatagtaataagaacgccaaccaacgccatcatcagtcacaacagcagctaccgagcagtcagccggtcagccagcgaagtcaccatcatcacaatcaccaccatcacagccatcatcaggcagcgcaggagaacagtcagccgctggagccggcgacgatagcccttaccgcatcaccccatgaagatgccctgcaagcgctatccgcccgactcgagtcggaactgcgcactgccaaacggcggcatttagcctgcaccgaagtattactcccggccgaccttctgccacggatagcttcgcagatgttcgaactttccgagaaggaaccgtgcggcatccgcgggtgcacggtttacatcgaattcgaggacgaaccagacaacagcagacggatcgccaccatgaagaccgatcctaccaccgtatccaccttcgagctgtatcttacccttcggcaagaccgaagcggctggacttcgatccttgccacagtttctcaagtcgcgattgccgtggaaggaaatttccagacaaattatccagaaggaaaaacaatcagctgtcatatgggagctgtcaacgggcagcatatagatccagctctgttctccttatag

SEQ ID NO: 1153 - DNA, 1041 bp, Aedes aegypti
tgctgcgaccacctccgtcatcgtcagcaatatctcagctgtattctaccgccatcaatgctagtagctgtcgctgtcggaaaactactgtctttcgaaaggcaaccgacacatcggctccgctgctcaaatatcgaaattcgtcaattcaaatagtggttgccgcggaaaaagaactaagatcgcttgatctgtatctacgaaaactagcaaaggcggtctcatctacacttgagagggactcggtctgcaaagcgcagcttctcttacttgaccagtcgagattgggttgagtcctggtcaccgagtggaacatttggcgactcatagggacggatctcgagcgacaactgacaactaacacataaaacaggcgttcgagggtgatttagagattagtagatctagagttcttaggaataagagcaacgggaagtgagggataatcaagacggtatctcaaccggcaaaagcaatgtattccgaaacaatctcggaattggacacgatagccaatgtgatcggtctgcggggagtaggaacgagtacattaacaaagtttgtcgatatgtggtatcacgtcttcctgtgggctctgttttcgtcgattgttatccataccggtgcggcggtaattgcgtttgtcacgctacgcaagcacaaatttggtcgattcttctcaatttttatcctagtaatgggtgttgtttctccggttaccggaggcaccgtcagtagtgccaccattgcctttgtacatagagcctcgaatttaccaatgtcgccaatcctggcgatggtatacggcgttggacagactatactgtctgcttgtctcgggttcacgcggctactggcaacactgtaaatgctattggcatatcctgcatatggtctgccagagcagacaacatcccactcaaatacaaatacatccatacatgtaaattaaacacatctaaattattgtactagtggaaattctaaatagatcaaacacgttagccattttacgatagtccagtttttatcaaaatgcgc

SEQ ID NO: 1154 - DNA, 2476 bp, Aedes aegypti
tgactcgattatgaaaactttggtttatttacaaagtcaaaatatctttcgtgaacgcgatccgatacaagcgcaaacacaaaacaaaaaaatcatgtgtcaggtgcagtgcatcagtgcgtgaagagtgcattcttcagggtgttggtgttatttttaattttctgatgaaatttttactaatcccaaaaagtgctacaaatattgagcttaattcttaacaatttatacgtttctgtccgtggtgcgtgtgtgccttatgaaaaaagggtccacggcaaggactaccatccgacgccaggagcaaggaagggaggagcggttcgaagcggtgataaggaaacggacgaatccgggtggacaaatcagcctggcagcaagaagggaaccgagttcagttcggtcagtcagtttagtttgttcaagctgttcatctcgtttgggtgtcgtctcggtcgaagtgctctgtgttcggaataatatccgcggaatcgagagtggaagtgccttatcagtttaatatagctaacaacaatcgtcggtgtgtgccttcggttcttttttttcggtccactgccatcacaaccattattggtcctcggagaatgtaatctaatcttctcggtctcaggcaggcaggcagaatcgttccgtttgaaagcctgaatcttatcgggtgccaacaccgacccctcgagcttcaatctgtgtgcagcagaagcagctgatatattttagtgtcgtgtggtgaaattttaaattctcggcggtagaagattgaatccctgaaggctgagcaaagagaaagaaggatataggatacagcacagaaactgcatgcgttcaagttcccgatgttcaaggcaacatactttgggcggacattcgcaggttgcaaaaatgtactccaaggtgtcgtaacttcccgcacattcggaacgaaccccaaggcaaagctacgtaaagtattggttgtgtcgaaactaacgcgactagagttcgagaaaacccgggaccaggccctcagcgatgaaaggctggagcataaaattcgcaaccgtggctcggactacgatgcgatgaaatactaccaccacctgcacaaggacgtggaggccgaggtggtgaaatcattccgcgaacaaggaatcgaggtgaaggtcgtcacacgactaactatcaataagcagctgctgcgatgggccgacatgctggtgccagtcggaggtgatggaacgttccttttggcagccggccgagccagtccgttcatattgaacggaccgaccaagatgcccgtggtgggattcaattcggaccccaggcgatccgagggaaggctaatgcttcctaagcactattccagcaacgtagaagaagccgtaaaacgaatcatttccggcgatttcaattggatgcatcgatcgagaatccggataacgctgatagggtcgactacgacggaacggccaccgcccatcgatctacatgagtacaacgtggcccaggtggaacacaaggacgtgatcaatggctccgaggagggcagcaacaatagaattctaccgtacttagcgttgaacgaggtcttcataggggaaatgctgtcggcgcgagtttcccaccttcacctacggatcgacaaatccgacgtggttacgaaaaccaagagttcggggctgtgcgtcagtacgggcaccgggtccacctcgtggctaacgagcatgaatcgcctctcgacgaacaacgtaaaggacctcatcgagatcatcaagcggcgatcgaagtccagcgcgctggagggaatcgatccggcggcagtgtccgaggagtacaatcagaatctggtctacccgccggacgacccgcggctgtgctactcgatacgggagcagatctgcgtgggggtgtggcccaaccccaagggactggaatcgaggggatttgccaagcaaatcacagtcaagtccaggtgcattgatgcaagcttagtgatagatggcagtattgcgtacaatttcaacgatggagcaaaggcgctactcgaggtgcacccggaggacgcgttgctgaccatcgacatgaaatgaagctacgatttatccatcttaatagggtttaaggtacagaaagtgcaaccaacacagactgctggtgagattgagcagctagctaatacgagatgcaattacatttttttttccgcgtgtcggaaaaaacaattgtgcacaagtcaactgatagaaaaaaaaagattagacgtcattttgatatccttttcgttatcatattatcatgtttttaagttattgttagtgtaattttacaaatggaggatcatgcatttatttatcgccgccgaccaaacgaaagtgctgaaatatacaagtataaagtgaggtaagtctgttgttccttgagggaaagaatttccaaaatcattgtgaagtaaaccgagagtgtttaagataaggat

SEQ ID NO: 1155 - DNA, 1671 bp, Aedes aegypti
aaggaaatcaagaagccgttggtcgaggcgctgaaactggcggcgagtaacaaaatactcgaaacggaactcaagacgcttcagaaggagcacagcatgctaaaggatatggtgcgagatttggagcaaatacacgagcagaagcacagcaacgcaactcagcagtgcggcaatggaaacagtagtaccagtagcaacagtaatagcaacactagcaacagcaacggtaacagcagcagcaacactaataacaacagcagtaaatcgacgaatggcgctgccaagagtagcggtaatggaagcagcagcagcagcaatactagcgccgaaaacgggaacagcgctccatccaagagtgcagcatcttccggtacttcggcgacggcatcttcgggttcgggcgttcaggcaagcaaaatcggtgcgaccgctagtcctgccaaggccatgctgaaccaagcaaccaatacgccctccaagatggtcccgaaagggaacccttccacgggggtaacctcgcagcaaccgacgggtaagatggtaactaaagttaccagcgtgacgccgaaacccggaaacgggacggggacagcttctggaccgtcggccaccactccgggtaaggttagttctaagtctaccagtacgcatcctagcacggtgccagccgcaactggggcaggctcatctccgacggcagcggctgcggcagcggggaacgcgacaccgtcgaccagtaccagcaatgctgccgccggtcagcatctcatccagtcgaaggaggagcacaagaagacgtgccatcggggggccaacggtggcgagaagggagacggttcatgtgtgtgctactattgcacactgttcggacagagtgtttgtttggaatgcaaccacaaccagcgaacgaacgaaacgcgcgatcgattgcgaaaaaaaatcaaacaactacagagcaacaaggacaaccagcagcttaagtcgttgaatctgaagaacatcaagattccacacggtgggctgctgaagaaaatcaacaccaataagagcaactcaacgaatgcagtgacgaacagcagcaacaataataacagcagcagcaacaacaacagtagtaccagcagttctactactagcagtaacaatgcaactcatccgacgtcggcgagtaaggaatcgtcatcgggaagcctcgcatcgaaaatggaagccttgaagatcagcaacaataagacaacgacggcaacagctggtcttgccacggcaaccaaagcccccgtagtgacgaagcctcccgccaacaagatgaacattgcagcagcaccagccaaaccgccagagatggccatcagtgcccgagaagtaccccaggttccacagccagtggtgcagccaactttaaggcctagcgtcaacaataccccgttcacgaaggtacctcccaaaccggtggaggaaacgctggacgccctggtgcgctacattgaaggtgactacgacgatgacaagcaaaaggacaacaagaagacagcgaagaaggtcaaacaaaaaagcaaaaagcaagagctcaaaaagatcaccgagctgggagagctcaaacaaaagttctccgagctaaaagaagaggacaaacgggcccagaatcggttacaattccaacagaatcttaag

SEQ ID NO: 1156 - DNA, 1557 bp, Aedes aegypti
aaaaacaagaaaaaggacaagctggcggacgagattgacgaaatcgatgaaatcgttgcaaagctggacggattggacgttggaagcagtgggaagaaaggagatgcgaagaagctaccggagaaagcactgggaaaggtgctaaacagaaagttgagcaaggactcgatcagttccagcggcagttcgcagaaagccaaagaaggaaaggagaaggttgtcaaggagaaaggtaaggcagatgagaaggataaggaaaaggacaaggacaaggaaaaagacaaggaaaagcccaagaagctaccagagaaggaaaaggaaaaggaaacgaagaagaagttggtgcggaagaagagtgaggcctacatcgatccggagtttgacaacaatgcattcaaattgttgaacttggaggacaccgaatcggatgaggaagaggtggaagttgaggaagaactggaggagccgaagcaaagcgaaattgtcgtcccggagcggacgccttcgccagtgcctgttcctcccaaagtggaggaacctccaaggccaccaacgccacctactcccgttccggtcccagtcaacacttctgccaccaagaaactcaacaaaaagaaaaacgaaaaggctaaagaacagtccactgctcccgcggttacaccggccaaagaagtcaaacaaaccaggagcaagcaggaacatgcagctcctcagccaacgacggttccaccgcaaaaaccttctaaaattaccaacaatgcttccaatgtgcaacctcacgtctccaagaacgacaccagcagcagcaagaagccctccggtagtgttcatcaacccgaaaaaccttccctcgataactccaacctgtccaaacgccagaagaaactgctcatgaagcaacaggagcagtccaaatccccgcaacaatcccagcagcagaagaagcaacaatcgcatcagcagactccaccgccccaggcaaaccaaaggcacgtcgacaaagccatgaagaacgcggaccgactgtcgaaggcacccaacgaacgtcgatccaaggtcaacatcagcgccgacacgacgctggaactgatcaatgattcgaatgcaccgtcgatgtcttctaagccggccacccagcccaaaatccctaacaccttcccaccgggcgacacttccttcggggccagcattatggaccagctgagccgaggaatccgagtggagggacttcaactgccaccgggtattacgctgacgcgagtggacgctgcccaagcggaagccatcaaggccaagcgagagtcgataaagaagatttgcgaaccgatgcaaaccgttcagccgccggaacctccgccaatgatgatgccaccgccaccgatgatgatgggctcgtccggaatgtacatgatgaaccccatgatggccaatgcggctgctcctccgatgatgatgaactccgctcccggtcaggactccgtcattatggtcgataccaataagctgaagggctcatccggggatggcgaaaagaaacccagcaagaaaaaaaatcgc

SEQ ID NO: 1157 - DNA, 758 bp, Aedes aegypti
gtttgaaaatggaagacgtctgaatctgttgctcaatttgttatttccgttttttcggtgaaaaaaatgcttagaacagtgcgaaaccggtcggaaattgtgcgtgagagtgccgggcagtgtttttgcgttatttggaagtgcatttcgccggatttggtgccgaaaagaatgagtttctagtgacacggttgcagtcagtccgtcagtgctggaatattttgctgctgggatccgatttttcatgtgtttttggagagacgaacaatcatcatcactcggcgactctgtgcgcggttttggatttcgccgtggaataataaaagtttcgacaacaatattgcgggcgccttattcggtcgcgttgtgtgtgtagttaggtaacgacgatgacgacgacgacgtgcctaaactgtgcatcgatccatccagagctccgtgaagaaactacgcgaatgtgagccgattgagataaagatcttttagtgtaacgtacgccagcccagccagtagtgagaatcctgaaatgtgaaagccctgaagaaggccaagccactactagaaggggcagcataaaacgtggaatgtttgtcggtgtatgtggccctcttaaggcgacaggtgattcgcaacaaacgagagcacgacgaagagtggagagaaaaataaagcggtcgaagaacctggcccagtccccgagtgccggacggggcgtgaagagagtcagtcaagtgccacgacaatcaaccagccaacta

SEQ ID NO: 1158 - DNA, 1424 bp, Aedes aegypti
atggatgtttgtcgagtaaacattttcattcaggtgaacaatgacaccatgaagccattggaagagtacatgctgtttacgaaaagcgaagtggcgtccatccaggtcatcaatcctcaaggcgttcgatccgcccagtgcaagcagttcgatattgtgccgaagctacccctcagcgaacccgccctcaacatgtcctcgggctcggataaaaattgggtcgtggaagctccgtcccggataccgtacgaagccatccaccaggacccatcggacgaggaggacaaaactcaggtggtgttcatcaccctgaccgcggtcttcgtggtgattgtcgtgtgctgcctgattgaagtgtaccgctcggatcgggagtacaagaagcggcaggagcgaaaaacggacgaggacatcattctgtcgaaggaacaggcggccgccaagatgcattatgaggcggccaccggtcccaacgccggcaaggggtacaattataaggcgatcccactggacgagaagaaggaaaatggtgccgccaaaccattagtcggcattctgaagaacggaagtgtcactcctcccatcaatggagatgcaaacggtcaaaaaactccagacgaaaaagacatgcagttgctgaccggcatccgagacagccaactgatggatcacgagccgctgtgggaatcgttggctgccgaggaggcggaagcactcatcaaagagattcccaacggtaccgaagatagccgtccgaactcccgacacggaagctcgcctcagctggccaacggaagtaacggagtgaacgcccaccatccgtccgaccgggacacggacagcgataacgaattgaccgacacctcgcataacattgcagatcaaacaatcctcgaagtagacgaacccacgtcggactcgtccgaagaacgagaagttgtagatccagtcgtaggaaaccccccggaaaacggagaagctgtagtcgatcggcaaccaggggaaccccgggtgccggacaatgtagtgatgcgagtcaagtataggaagctgccgccggtatttctggatgccgacaaacgacagtttggcaatccgattagctatctaggtggaccgcggctcgacaatcggaactcggtgcgctcgagtcggggcgatagtttgaccagtttggattcgttgatgtcgctagactagaatttcgagtggtggaaaataaactagtacaaagtcgcttgagaagggtagttttgaatctgatggtatcacagtccttagaattataaaaaaatatatttagatagtttaagaacgttcaacaacgatgctttaaacagcgttaccgaatcgaaatcgaaaaaaatgccagagctcaatgtatccaaaaattacttcagatttctttcaggataattccttaa

SEQ ID NO: 1159 - DNA, 3351 bp, Aedes aegypti
atgcacagatccatcggtagtggcagcaccgtccaccctaccactccaacgtcgtccctctttggggccccggtattcgtaggtcattcgccagtgaatgaacatccagcaacttcaccgtcgcaagtgttggtaaagtctacgctggtaggtggaagcaccaataccagcccgagcagtgtggccactcgagcagccgaagtgccgttgcacgttactcctcagcagcagtcacattccaatgacggtccggagagcaccagctgccccagtagtactagccgatcgttaagtcatcttcatagcagtaataacagcgttggtgcgtcgagtggtggtccagtgggaaagtatgccgccacctccggtggtaatggtattagtgctagtagtgccagtgttgattgtgagctaacgcgaccagcttcttcaggtgaaaccagcaacagttatagtagctccggtgagattggttggaaatcgaagaaaaacacttcaagtgcttcgagcagcagcagcagccccaaaatggttgcagcgagtgctgaagagatttgttacgagaagaatccaagatttggggggcccggagacgaggggaccactgttgacgtggactcgtccgaagaactaaagtatggtccgggaatagtgtcaaagttacgttgtcgttatttgagccttgcattgaggcaatccgcgaataagcagaggccttcgttgaataacatgcgtagggccaccagtttgaacaatctgttggacgaagagggtgaagatcttagtgaacgggagcaatcaatcgagtccaaggatcatcaccatcaccatcagtcgtcgcaggataaaggctatttgcagcagagccagaatgggaaatttggccaaattacgaaccagatgaacatggcaacaccgaaagcaaaaactccagacgagtacatctcgacgttccagaagagcgtgcagaacagttatacgcgaagtggccgacagacggagaagaagaacgagtacaatcggtacaataagcagcgtggtgctgattcgctaaaacgggcccgatcagttgaggcgctggtgcgctacgatcataaagcctgggagcgcgatatacagaaggaaaatctctacagtagcaacgatagcaatgtgatcattctggatgagattagctgtaccaacgggacgaccaacggcaacgccaacaactgtcaatcggtggcgatgaacaaggctgaactgataacggattgtgtcacgatcgaggaaaagatcatcaacggtcgggagaaaggtgatcccaaacccaaacggctgacctcgttcatcgatgcggacgaacgtcctccgccggatgtcgttcggcagacgatgaaaattttcgaagccaacgccaatcgtagaggacgacccgttgccagaactaacggtgctgccggtgaagttgctgccaaagtagcttgctacaaatcgatcatttctcaggacaaaccgccaatcacccatcccaaaccgccgctcagtcccaagaaaccaaatatcataccacgttctactagtcccaaatcgaatggagctccggtcgccaccaacggtctcaaagagaagccaatcctcccgaagctggacattggcgtgatccgcaacaatctggaaacaaccaacaacctcaagaacgttcaaacgccaaccgccaatcataataatagcaacacatcgacaccgctatctgtgcgcgtaacagaatcgcaatcctaccgtctcaagtatgaatcacccgccttatcgccaaacaacactgccgtcgctcaacacaaagtcacttctagtactacgacgacaacgacgacaaatcgcccggagagtcctcgagtcgcagcagctgccgcctgtatgcaaaacaacacaccaaacagtacggttctcacattcatcgactcaccatcgattccgactcttgtgagcaaactcaacaatctaaacatcgcgacctctacccctacgagcacccgttcttccacgccgcaagatttaccaccgcaagtcccccccaggcagcctccggtgcttcagtacgccaccagcgatgaagaggacccggacgatccggaggaccaacagaacgagtactcgataaatcacagcgatcgcgacaacgattcctccgacgatcaatcggatgaccttcaaccggcgacggaaggcgacgaagacgacgacttcaacgacagcgacgagttcgattcccccgaagtcaaaaaagtgtcccgcactgccatggacaacatttccagagcgggcgttacgacgcagttccgcttcaacggtcaatcccagcagaacaaatcccacctgccgtcgctcggcgccggtgccaagttgctctccaacaagaaactgaacgtggacgatcatcattcgaattcctcgtcgacgtcgtcatcgccgatcacagtgccagctaccgtcgtcgtggctcacaaaccgcctgtgccactgtcacgtgaaagtctcgcgtccgccaatggccttaagccgaacaacaccaacaatagcaatatcggtagtgtcacgcatagttccaatagtgtccacagtagcaacagcaatgtcaatactaataatatcagcaatggaagcaaagtggtgataaatgattcggtcgcttcggcgccgcccaatgtgagtgtgtcccctgccggaagtgacgtgtcgaaaacggtgaatctaaccgcccgggaaatcgagaagaatcagatcaatttggtcaggagtgaagaaagcctcaatagtggtgctgctgccgccgcctcagcccccaataataataataatagtgtcggtagtgtcggtgcagtgctgggaaaaactggtgacgtcagcaccaacagcggcggcggtgagttcttcatggccaagtggggcgctcagaagtcgtcgtcggcggcccagagcgaaaatgccgctgctgtcggagcagtggccagtccgctggcagggctggtgccaacgaagaagaaagtgaaggccccgccgccacccatcgaggccaacacgatggtgttcaacttcagcgaccggaaggacgtgccggattacatcgagaacgacgggatcatcctgcggccgcggccacgggaactgcctaagcccggcgagtccggtttcgtggtgctgggcgacctcacgctcgaaacctcgaccgatccggacgattcgtgggccatgggacccccgtcgccgtgcgatgtcgagtttgccaacgctaacattgtgatcaacggtaaatccagtatgagaaacaagacttctagggatagcaaggttttttttcgaaaatgcgattaa

SEQ ID NO: 1160 - DNA, 1798 bp, Aedes aegypti
aactgccccaacgccagacatgtatccgagtattacttcacagtttcgaatgggcggtgccgtccaaagtccgtacaatccttctccgtcgcaacagatgaacaatccaagtacaatgctgatctcttcgagcacaaactcgctcatgtcgtcgtcggtaaaaccgtcatcccaacaaatcggtgcaataggttctaagagtggatcagttggacaaccttatggccaacaatacatggggatgttccaacccgctccaccactgcagaacaatagcttctactcaaattccgctggaggccagagtgcatttttcagcggtgcaggagctacacaaaattacggaataccggcagctgctgctggaatgttcggtggacacggtggccaaaccccatcgaacgctccgcctccgcaacagcaacttccgaactatcccaacgcatcgcagttcttaaattcaccgttagcgttggcggcaaacgctatttctcagcaattccgcggagggcccacaacgaatccgcaatctgccgctgcagccgcagcatacatgaaaggaaaccaaccccaatcgcatatgcaggatcccaatggtcggcagctgaaaagccctttgaattctgatgcaatgaataatttaaaacagattccaccccaagcgagtccgccacatcataagggttacgcaacagcatgggagatacaaaatcaactgattcaacaacaacagcagcagcaaaaccagcagtctaaccaacagcagccaccacaacagcaaaatccacaacaacatccccaacagcaaatgagtcaaccaccgcagtctcagcagcccaatccaaatcgaaatatgatgccccccaaccagcaacctccagcaggactgggaggtgccggtgggggtcgtcctccacagggtgtccagggtgggggcatgcctcagcgatacccagctcccatccaacgaccgactaactactcccaggcgccagtaccgggaatgcatcagcaacggcccattcgtcagtcaggccataaccctggtcaacaacaacaggcaaacatggcacaggcaatgggcaatcccaacaaacattactacggtgggaatcgaggtggcggtcacgttaacgcgatgaacgagcaaagccttggcggaaaacctggcggtggaaatgagaaaccagtgctcgacggagatgttaacaaggatgattccaagaagaagtaaacgtcaaatcaaaaaggatcttcaatggagtgtagatgagaattggttacttagagaaaagctaataggggaaaagatgtgagacattaaatacattttggctgaaactaatagaactgagttcaacttactgaatgagagaaaaagtattcatttcacagttgtaacagcaggcgaaaaaatacataatagacaaacaaggtgcgtagacgattcagaaattcaatgaaactacacgaaaaatatgtattattggtaaataaataaatacctatttattaaatgaaatagttaatggaaatcatcggaaattgattagccacgcagtaacacacgaagaaacgaactgcgacgttagctctgttaacactgaaattcacaataatcgcattataccatttaactcagcatctgaataccgattgtaatcagcagaacgatcacaaatggagtggcgaactggtactaagtaatactgctacaatgcttaacacgccccctggtatcagtgaaatggatcggtttgactgagtttcactataaacgcaaaataaaaccttgaac

SEQ ID NO: 1161 - DNA, 1242 bp, Aedes aegypti
ggttggctcctgaacatcgagtgcgccctggacgaggacaagatcccccgcctcaaagacttcgtggcgtatttgacgcggaaatcacacaaccagatccccggcagcatgatcatctggtacgacgcgatcaccgaaaagggtctcctcagctggcagaacgaactgaacagtctcaatcagggtttctttgcggcgtgcgatggaatctttctgaactacacgtggaccaggcagcatctggagcgatcggagaacttcatccgcaattactacccccgacggaagctggacgtgttcgtgggaatcgatgtttttggacggggtcaaactgccaagttggatacccattctacattggccgccgtcattgagttcaagttctccacggcgatcttcgctcccggatggacgtacgaatcgctcgaggagtccatgcgtcgcgatcaactcgatccagttcagtgtaatgatcggttcctgaagctgaacgatcgtttctggaacctcctttggaaatacctgtacgttcgaggacctacggaacttcccttctacacatcgttctgtctaggttcaggaaagattcgtaatcgcctgggtaagactttggacgaatcgtggttcaatctatcgcgccagggcttccaaccgagcattccgtacgcagcgccacgaaatcagggaatcgatccgatctactggactcacagcttcgagacggctctggacggtggatcgtgtcttcgaatggaggatatccacccgaactgtcgactatttgcgtgtgatttcgcgtgtggaagcgatcttctggtgggttatgcgttccgaagaagcaatgaactgagtgccgatgtgaggttggtgttgaaggcgtacaatacgcggtaccatgactcggtgaagatcgtttgtgggggcgaggattgtcacctcagtgagagaagaaacgaaatgaaagcattgctattggacagtgaagattggcccaggctgttggagttgaaggcgcagttgaagcttccgctggtggccgcgatcaacggatgggagattagatactactacctatccttcgaagccatcgtccagccggtgtccatcgtggacatcggcgtcgagctcgtgaaagatgaccccaaggatcacgtcctgctgggggccatttcgctgcaggccggtttccccgctagccgcagtcgcatccgcaagcgctcgatcgttacgtacggagcgtga

SEQ ID NO: 1162 - DNA, 3883 bp, Aedes aegypti
tgacggatccttgaacgttatggaaaaattgcaagaacatgacagatttgcccaatgatgtcggcagcaatctttgaaataaattcatcaatttccaaaaatcctttaaaatcttgtgggaaattcttcaataatctcactcgaagttaagcaaagcttttcaaaatatccactgacaatcttaccaggcaacagaattttggaatgaatttcggaaggaattctacaaagaagtcgggaataatccatttagaaggtagtaattggctactctacaccgagcattaatattccttttatcttcagtatctttcacatcattatttagtgtaggtattatataatactcgatcatgtattgacccatttgttcaacagatttcaaataacacacttccaattttttttcatttttaaaccctacgcgatataaacttttgaaataccttaagtaacgtttttaggcttataggtctattatacagcttatatatggcaagtgagctatataatagcattattttaacactgagcgaattaaagtgctattttattacttaggacattgatcttatgaaatgcatcaataaatggggattaaatcgccttcgtctctcatcagtgaaggagtgtcaacgttttaatactaacaattttcctaatattgtacatacagctgaatatgtaactattaccgtagtctagactaacattcacacattcattgtacattgagttgcactaaaaacttctgagatacccaattcttctcatcaaaattctaataatctttctattctatttacgttagacgtggaaccgcttccaggatggcaaacgggtggtcgacttcgtgctggcctacaacggccaggaccaaagcgaagagatggcccgcaaaagggccaccttccagcagaacctccaagcggagggtttagaaatcgaaccggaatgttcgcagcgaatccacttcatcaaaatccacgtcccccaggaggtggtgtcccggtactgtgagatcatgcgcatgcagatgccaacggtgaagctgccgggtcaggacaatattgcgccaaaggatttcagcgtgagcggtttgctggttaagctgtttaggaggccgctgttcagcttcgtgatcatcgatcgggacaagttccgcaagagggaataccagctgaagcacgagtatacgcgggacaagtcgtatctgtttgacgacggacagccggatttcttcactccgagcatccggatagcggtggcccattttattctggagcggacgtatttcaacgtgggggaggagaacaagtacgacatcgggttgaggaagctgttgaacgatggggtttatttggatgcttacccgctgcacgatggaaacacggacatgccggaggtggagtgtcagaggacgcttcttctgcaggagtgggcttccgtgatccggtggatcaagcaccagccgttggaccacatcaaggagtacttcggggtgaaggtggcgatgtacttcgcctggcttgggttctacacgcacatgctgatctgggcttcgatcgtgggtttgctgtgtttcttctacggattgctaacgttccgggacaaccggatcagtcaggacatttgcaacgacaacacgacgatcatgtgtccgcagtgtgacgccaagtgcgactactggaggctaaacgatacgtgcacaacctcgcaactggcgcacatattcgacaacaacttcacgatcgtgttcgcggtgttcatgtcgatctgggctaccctctatctggaaatgtggaaacggtactcatcggccattcagcaccggtggggcatcacggattactgttcgctggcggaacctccacggccgcagtatttgtcgcggttgaaggatagcaagaagacgatcttcaatataattaccgggacgcaggaaccatcgccgccgttctggacgaaaaagttgcccagcttcctatacagttactccgtgatatttttgtttataaccctagcgatcgccgccgtcttcggcatcgtgatctaccggatgtcgctgatgacctcgcgcaacatctacggcgacccggacgccgtctcgaccaagctgttgctcctgccggcgacggccgccatcatcaacttgatcgtgtcgacgatcctgaacttcgcgtacgattacgtggccgtctacatgaccgacatcgagtaccggcggacgcagagcgagtacaacgagagtctgaacctcaagatctacctcttccagttcatcaactactacagttcgatcttctacattgcgttcgtgaaggggaagttccccggctatccggcgaagtacaaccggattctgacgctacgtcaggaggaatgcagtcccggtggatgcctgatggaactgtgcatccagctggcgatcatcatgatcggcaagcagatcatttcgttgatcctggagattctggtgccgttcctgttgcaaaagttccgcgagttcagaagcgtgctgggcatcgagtcggaggaatcagagaacggcgagaagctgatttgctgcaaccagtggaccaaagattttacgctgatcagctggaccgatcggagtttgttcgaggaatatcttaagatgatcatccagtacggattcataacgatctttgtggtggccttcccgttgggtccattgtttgcgctgttgaacaacgtgttcgagacgcggttggacgcgaagaagttcttgctgtactacaagcgagccgttccgcagcgagtgcgaaacatcggcatgtggtacaacgtgatgcacgtgctcggaaaagtggcggtgatttccagtgcattcattatcgccttctcgtcgaacttcatcccgcggctggtatacatgtacgtcgtgagccaggacaaaacagaccgaggctatctgaaccacacgctggcgtacttcaacgtcagcgatttcgaaccgggtgctgccccgattgcctccaagtttgagaacgtcaccgtgtgtcgctaccacgagtatcggaaccccccgggagcggatcgggcctacaagcgaccgctcatctactggcacatcctggccatccgtctggccttcgtggtcatctaccagaacgtggtcagcttcgtgcagattgtggtggcgtgggccattccggacacccccggccgactgcaagatcagatcaagcgggaacagtacctaacgaacgagttcatcatccagcaggagaagctgaagacccgggagcggaagtgtggccgcaatggtagctcgaaacggcgcaacgggacgctggcacggcagcagagcagtttggaagaatacggcacgacggtgagcctgaccgaggaggaaggcgaagacgaaaactacgtccggaggaggccaaacggtggaaccgatccgtacaatcacgaacgcttccaggagtgcgagattgtgacgtcgagagtttagatgagggggctcgaaacaatgaccaacccagtcagtagagtgtggcgtaagcatccacatgttaactatttttctactttcgaactttatatctttacactgacgacgctgagaaccgtactgatcgaatgcctttcttttacgttttaaatggcatttcgttttgcgaagctttacatgtgaatatatgagacgcaacatttgggggatctgaacccctagcgcaaaacttagaagtgtagctaaattttaggtagctattatataggagcgtaaacattttctttgtaccaagagaaattgtattgcatgaacaacaagaggaacaacctaaccaacacacagcacttatttattaaactaggaaaaacaaaacaaccaataaaatatattttcaatttt

SEQ ID NO: 1163 - DNA, 5740 bp, Aedes aegypti
atgatgttgcccccatcgccttcgccgtcaatgggcaagttccatcgttaccatcagcagcgcccgccgtcctcttcgtcgctgtcgtcgtcttcgtcatgctcaatgtctccgaacagtggtttcgcaactactggtggtggcggtccaggaggaatcagtggttccgactcatcgtcctgctgctcgtcgactgccagtattcaaacggccataacctcatcatccacggcaacggcagtgccgatggaagtggacgatttgccacagctattccccatgttacccccaccagtcccatcaatggccactggtggaagcaccacgcgaccttcaggaggggcgggatctggatcttccctctcactggccggcattacacgccatatgcgcaccgtatgcagcaatcattccactagtcacaataccggaagcagcagtagtagcggaacagtcatcacctcctcaaattctgctacggccgctaccaacaacaccctctttctgtcgacgattccgttgcgacgcttgcgaagctccctgcggcggcattcggtgtcagctgcccacatggcaaagcaaaagtcctcccagagcattgtaggcagtagtagcaatgttagtagcaatcctagttctaacggtcccctatccggcggaggcggtttctttggcaagaatgccacgggtggaattgtggtcgatcgttcgattcaaccggttcaccatcggacccggtccctgccgttaacggaggaaagtgcaatacgtgtgacatacaatggaacctttctgcatccccattccggcggtggccagcaaacacagcataatcagctatcgagcatcggtaatcgcaaacatcagcaatcatccagtttatcgattgcttcgctcaaatgcacctgtccatccagtggagccctaccgatcattgttgtcggcaacagcaccagaacaagtcattataatttatgtcccttgcatggcagcgctgcccattcctcgtcgccttcatcgtcatcgtccatggcggcagctgggtccactcgtcaacaggactatgaaaatatgaataaatcatgctcgtacctgccgtcaagttctcctccggatcagcagcattattacaacaatcacttgttcgaaggcactgatagcaatcattctgcaatcgcgacgacgttatctcgcagctcgatggagagcataatcgaagatcaaaagtacctcccgatgaatatgaaaaagcccacttccgctcccagcagccaccaaccatcgacgacagctggtggttcccaggaggaaaaggacctggcaaatgtggcacctaatcttcagttcatcagtcggctactgcggagttcgcaaattcaaactgccaataacagcaaactggccgctttgaaaatggccaccgccaccggaggtaacaataatggcacgggcaacatcagcagcagtagtagtagtggtagtaatagcactggtagcaatttgcacggtagcacaacaacgggaaccggaaatggtaccgccatccacgcttactgtagtagcactggcagtggaggcacgctaccgaaagggggcacttctccgccaggttcgctgaggcgccgtagcggtcgtaacagtaccaaatccaggcggagcgcagccattgcccgtgagcgttgcgacagtcttccatcacgaaatagaacaaccagtgaaaccagcacccatcagcagcagttgatcatgaacagcggcggaatgcctccgccgaggacgatcccatctgccagtttcaaccgaccgcaatcgatgatcgtgaaccgccagagccacagccatagtcctccggtgcattcgtcgccgctgagtcctccttccggtgcatgctctaccggaagtgatgggtcctcgttcagtatcgacgaacctgacagctacaacagttcgcacacaccggatgagggcaatggctttcccaaggtcattaaccatctcagctcaggttgttccattccggaggagaattccgaggagtacatcaacaactacggaaaagttcctcttaggtcccacacgcaacatcgatctatggacgagttcgttaataacgcgatcagaaggggcagcccggcaccgacggccaacattgtcagttcggtcgatggtaccggcaactacatggagatgtacagcccgagcggcagttcaccgggcgatccatccggcaacagtggctacataccgatgtcaccgagtacggactttcccagaggcttgtacagttccagtgcacactcacgtacctccagtttggcggaagacaccgttgacgcatatgttcctatggcagcaccaggtcacaacgcggaagagtacgtcgacatggacccgtcgcacaatagtagcaatcgaacgctagctgcggcaacgaccagtcagactacgattacgactgccggtggcaatggtaatattagttcggcggcatctagctgtagcattacgtccggtaccccttcgactgatatgcggttctccggatatcacctggacaaggttgaggctcgctttacaccaagcgaagatgatgaaatggagcgaccattgcggacgtactctgtgggcagtcggctggagcacaacaagcgcaagttgcgcgtggacatgctcagttcagaaggttcctcgaattcaagggttcgagcgttttctgtaggctcaagagcaaaggttccgcgatccgatgtgtataaaggaagcggtgctccgatcacagcaccattactttcggcgagtagctccggaagcttgcaggaaactagtagcaacagcggaagcattaccaactgtgctcctgggacaagtacaaactccagaggttcaaactccagcatgaatgaaggcagaacgggcaagaagtcgtcaagtgcccctaccttggcgccaaagcctcatggatcgtttgatcctattatggatgatttgatggagatcgattacagtgctccacagtttcacggcgaaccggctgttagtagtagtacaccacaaaagacttcgggtatggaggattacatggagatgacggcaggagggaataagaaaaataccggatatgttgaaatgaaaccgggacatatcccaccggtggttgcgagttcccttgagaatagcgattatctggatatgcgaccggggacaggatatgaatcgaatccgtcgacgaaaagcaaaagctctccgattaagattagttcgccgaagaaattcagcagtggtgggaataataacaacaactacctggaaatgtccccacgtatgatggggacatcatcttcgtcttcctcatcaatagccaaccgtaaatctgcagtaccttcggaagattacctgaacataagtccactgatgatgaccagtgcgggaggtgatagtggtaacgaggaaaaaatgattaacgaagaagaggacgaggaggaagtggttgcgccaagtagtgctccagatgtctacatggagatgacatggagccagcccaagactaatctgaagctggattgttctaaacccgcatcagatgactatatcaatatggattatagtcgcaaagaaggaggctcgagtgcgttggacccccgtatgagttcgatgccaattgcgattcagtcgggaagcgctggtcgaacattacaaggggacctgatggaaccaaagataggcggagcaccgtctaatattccaaattaccttcccctgaattcctcggcgacacgacaccaggtcgcagcacaaattggcttcagcccaaagcagaacagtttgcgatcacgctgtgattcgagagatagtggaattgtgacaccttccggaagccaggtaaccattttcccgttcagtcctggaagcccaatcaaatcgttttcgttgggtgtggaacctagtgcagaagagaggaaatgtttcgtagatgcaactaccggcactttgcgaatcagtgaaaccgatgaggataacagtgaagaatcgaatgagttcctagcagtcgatcagcaacagccatcgcaaccgaaagacgccacggagagtagtaagctggaggatctaagtcataactatgccgagttgagtataggtcaccaacaacaacaacaacaacaacagcaacagcagcaacaaactcagcaaaagactgagaaaagtagtcatccaagttccttcagcagtaccaaaaaagcaaatctaagtttaattctcacaacatcgactaatactagaacaacaccaacagtaactgctatgaagtctgccgtagaatatccggactacgtcaactgcacaccggtaacaactcccgtggtaactaaaccaaccactcctatggcagtggatgatcaagccggggattatgctataatgaatccagctagtctcaggaagctatccagcacttctcagtcggaactggcatcgacggaaagtggacttcctccgttgaccaaaaagtccaatcagattttcaagccgataacatcgagtcaagatgaagcatttctgaagaaatccggtggtgcctcacccaagccagcattcagtcgacaatactcagaacgccgagctggtccatctggaatcgattcgtcgggttatgagatgcttcaacgcacctcccgaccgaacagcgtaaacagcgaaaaaatcaccaacaaatgtcctccatctgtaggctcgacacgtcctagttcggccaatagcgacaggcttcccatcatatcagctacctcatcatccgcttcctcaacatcaacgttgtgcgagagtaaaaaccaaagccccacggcgtctagcatgatgattgcaacaactacgactacgacgactcccggagtacgaccggattccgttacctcgctcacagatccgcacatcatttcgagaccgccatcggtaagttcggaacgcgagctgcactatgccagtctcgatcttccaccttgcacaaaccctccacaatcggcgccggcagtcggtgcagtggtggtaccacccaaccgcatggaagttgattccgatacggccacggcaagtcgccctggtggacctgactcgttaaactccagtcctagtcccaactctggatgtacctcgcaacaacagactggttctgccttcacgtatgctcaaatagattttgtccgctcggttgcccaggcccaagcccagcaacagcaacaacagtcattaaccaaaagcggccaacagcaacagtaaatagagcacaggataccgaataaaacacacacacattcttacatacacactgaaacaactgccaatctgaaacaacaaaagcgcccctcctttcaaacgtaagtatagcggttaagctgcgtgagatgtacatatatacagttgcagcaagcaggaagcggaagcacactcctcatgtgtgcactattgcagtagtagcactgcaaaagttcggattagggacagttcttcgttaccgtttattttttgtaccaagatgtctacacatgaagagagagagagggcaccgagaaggagagaggcaagttggcagtttgatcgaatccaagaattagcagaggagagagagccacactactacctaagcatgtcgaacgttatttttaataagtgtttaagaagaatcgcctcgcgcgatcagcaaaagatggaaaatgaaacaaaaatattccaaaaatagtttaattgc

SEQ ID NO: 1164 - DNA, 354 bp, Aedes aegypti
tccgcggttgacggcgggaagaggcgaggagggattgtggttgtggccgtgagctgggaaagcgatagtccagttctcgcggctggcgaagaagcctcaaagtggaagagtggcgaagtggaatccggttctacaaacgaccataagaatacatacgtacacgtactgcttggtgctactccaggggggtttcttcttctttcccgatccgagatagatgtattgtacggtgtccatgtagacgaagaagcaaaagtgcgaagaatagttcttactgaagacgaccgcgacgaagacgacgacgagaccccatcaacaacaacaacaaccagatcacggatgttgggtctctga

SEQ ID NO: 1165 - DNA, 1779 bp, Aedes aegypti
gatgacgacgatgagatagagatggaaggaaacgacaaaagccaagcggtgttcaaccgcaatacgatggatatctacgttaaaccaaagaaagatggcggtggcgctagcacgactagcaatccggacatctcgtacgaagaagcaggaagcgaaatatccgccgacggattcgagaatatcatctgttcgccaaactttccacaactaggtggcagcagcactatgggcagttatcaggacgatgactacgacgatgatttcgacattcaaatcctgccggacgagaactcgttgacgaacggcgagagtgaaggcgatgacttggtttatccacctcctctgctgccgttcgggaactcggaaacgagcatcacccgcataccggtcggaagtaaaatgcgaaccaacggtggatctgcgctccttacgccgatgatccggcgcagacgccagtccagcagtcggggcggaaggctgatactgtcgacgagtccggggtctcgagatgccaaggtcaccatgacgaatggggtggtcattccaccgtcggcgtttgtcctcaggaaccctcgggggaatcagccccggtcgtacaacacggacgccctctggtcggccctgatggatgttaaggcgggagagagtatatacagagcgtcacaaatccacaaagttcctcgcaaaacgctccgcaactggatgaaacggtgggacatcaagtccgcctatccgatgccacggcagctaaaggaagcggctgagaagaaacgtatcatcaaggaactgactgaacaagcacagcaaatcggcgaagaaccgatgcagtaatagaaagaaatccaaccaaccaattcatatgtactagtaatcttaaacagaaacttaattatacgtttttacacgaaacaaagaaatgaaccccaaatatgaaacaaaacggaaatgatagtcagcttgaaacagatggcaaagataagagagtaagagagaaagagacaaatttatgatatacagatttatatatttttgagttatagttactaagtcagacatccccgtacacttcccttcccaccatcccaaattagaagcgtaaggaaacctttccccagagatggaacggagaggatatggttcaaagtgaaatctagttcggtagcgtttaggttcttttataatcgttttccaaaaacatacagaaagcatgagtgtaatgaaaatctcctaatccttaatttagaacatttaatctgtataattatgttagcgaagcacttttcattacgcaaacccatatattggagaacggtcagagatagtttgcatcgctgtttgcgagaataatttcacaaaagtagtagaaacgtacatttacttctagtcaaatgttgtaaaatcacaaaccattagctttttcatcccaagggctttatatacgaatctagttttatgataattggcattacatttcgttgtgtacgaatagtcacgctcggttgcaatgtaggtactacaaatatatattttatccacttaggccatatatgtatgattagtctttctcgtacctttgatttcaactaactgtgcaccaatcatattttatacatccctttaagtaagtacttacctgaatgtggaactgatcgggggctcgccgacgggctcccgatcgagggcagtcttgtttgaaataacttattttgtacggaaccattctagtgtcgtttcattaccaaaaattgtgcaagtcaataaagtaattcgagtaaaacc

SEQ ID NO: 1166 - DNA, 1493 bp, Aedes aegypti
ttgaccaatcacgatttgaccacgacacaactggactgacaaacggacgaacggggtgacaggagacacttcgaacaagactctaccgtggctcatccttcagaactgcctccctcgccgcaccaatgggaatgacacaatgaagcgatggctgcctgaaatttgtaaattactcaccagcactacaaaaatgagtgcacctcaacggaaaatcacataattcggatgacagccgaacaaaactcatttaggacgaaacaagtagcagagtgtattatagtatcgtatatattcgtataaaaccaacatgaaacaacacactagtaaagtagacactacatacaactatcaagattagtgaacatgaacaatacaatgctgccaaatcggcatcctctgagcgccactcaacagggcttagagaatctcaggaggatgctactacacgtacgagagaccggaccagagacggaaagagtgaatccttaggctaggacacggcaaccaacaacctcaaccaatttcggaggacgagacaattttttcccccttcgggatacatcaatcccccggaagaaggagtaatagaagctagtcgatgcatgccacaagcgtgggatgagtgcatcacaaatcgtgcaacacatggagaactacatcgcgaaagtgttgcggatctatcgctggtggtacggggactgactaccttcgaaggtaaggtagcggaacaacctcttttagaccaccagcattttttttcggactgatcagcgagggccatcattcaattaactggcaagcggtaggaatcactatgaatcaacagcaatttttcgcatagacaaactaccaaaccatgtgggagatgtgcagccgtcattcacggggacacatttgtaatgggaatcgttaatcgtaaacgcagaaaaaaaaacgtcgaaaagagatgcgagacatcaatatgtaatcaagaaaactgtaattcatttgcttttccctgatgatgctgcaactgcccagcataaataagagtagtaatttgtaaaaagggaagtctgctagttgcagattgaagaacgaagtcgagtaaaattaggacgaaacgaaataaaagaaactgctgcaggtaatgatgatgaccatgatggtatgatttaagcattagtagacaattttttagttctatttaggttccgtaagtccactatgtatgatcatcgtgggcgaaaaagctgtgtttatttgttaaggaaggaatacatttagaaaaaaaaggttgcgcaagtatcggctactacctaggggcagatatactactaccgtaccagtaagataacgatttatagtgtgtagtatatgactaggtacaattgctaccagaaagaaaaaaagaagcatgttttctgtatgcgtgatagtgtgacatttcgaagctttttcgtttaatgattgtgttcgcaagtggataaaataaatgtactgtattaaagggt

SEQ ID NO: 1167 - DNA, 3101 bp, Aedes aegypti
tgctccagaaagtcaagcaatgctaaaatcccaatgcttaaaaataaatctcttacaattatgtttgcaacctttcggtcatggcatgattaatatccaaataccacaataaccaaaatgagagggagcaaaaggacaatttacgcagagaaaagtactttctgtagtatctccgtcacataattgcgcacctcactctgctaacgagagaaagtgtattcgctagtcgagcaagcgcgcgcttcgtaaattttagacgagaattttaaatttaaatcttcctcggtaacttactcgccgacttcccgtctcatcgctagcatttagcagtgcaaaattgaccggcggctctcaccctttttaacgtttcacggtgcaattttgtttaggcgccactctcgctcgcatgagctctccaaatcggcttggcttgagcacggaatttgcgagatttccttctggtgttcataagcatcctcaaatcccctgtggagaacacctggtaggagaataattttcctccttgaccgggacgcgccaacgatttggatggaggaaaagttcaaaccgttcacgcgccgtttttttcgggatgatagatgattgctgcagtcgacaaacagctcagttgcaaatcggtcggtaggagaaatcgactctcagctgaggcgttcgttcagtgaagcgatctagtggattgatgtggtaacaaaaattaaggaagctcaatgaaaactagatctaatcaaagtaggtgaaaaggataaacaagaaagccgacgaataaccaggaaacaaattaaatttgagtgacataatcggttcgtttgcgaagaatcgatgtaaaaaaaattgtgattgtgcatctgagaggatcaacaataggtgaaaattctgtgatttgattgaagtgagtgaaactaaacaaagaaaatacatcaaaaatggaggaaagcaatgaagtggtgctttacatttatgacctaacacaaggcatggctgctatgatgtcccagatgctgctaggtcgccacatcgacggcatttggcacacggcggtggtcgtcttcgggcgggaatactttttcggatcccatggcatcacgagctgcttgccgggagctacagtgctcgggcaaccgttacgaaaggaggtgatcggtcagacgttcatcccccaggccgtattctcggattacgtgcgtggcctagcggaaagtaccttcagaggcaccaagtacagtctcctgagtcacaactgcaacaccttcagcgaggatctgtgccagttcctgtgcggcgtcggcatccccaagtacatccttgaccttccgcaggagttcctgtccacaccgttgggccaaagtctcgcaccgctgattgccagtctcgactcgggtggtgatccgactgcaaacttccagcacgagtcggacttcctccggggaggtccaccacgggaaaccagtcccggctttgaccagctcaacacccaaatcgagcaggcccgtcaacagtcgcacgagctgaacgaacggcggaacaagatccgcgacaagatcgacaagaagaccaagaagaaagagaagaagtccaggaaggaacgggcgcaaggttcgggcgaaggctccgatcagaactctaccggaatgtctgagggcgaagcggaatcgatgaacggcagcaacggtgttaatgggtccatcccaccggagatgctgccttcggagaaggtgcgcaaggaagaagaagctgaacgactggctgaggaggagaggaagaagaaccgtgatccaccgatcatcttcaaggaagtcgatccaaaactcgaactggaatgcctggtcaacttagtggacgggaaactttcggaggaagaacaggtagcggtggatgagttgcatcagtatctacttctgggtgagggagcttgggccttgggagacagtttcctggtattcgttggacgcatgctccgagataattcgctctcgacggaagttcgggttcacttgctccgtgcgttggccaatgctgccctgaaggacgacatcattctgctgctgcaccaggaccgacgagaccacgtgctgatgaactttgcccaggacatcgacagacatccgccggaggaacagcaagcaatggctcttttcatgtgcaacctgttcgagaacgacaacgcctccgagtggctgctgtacatctccgagtggcagtacagcaaccagtcgatttcgaacatccgcgcgaccaccaaggtgaccgtccactgtctgctgtccgcctgtccccgactgaaggacctcggcaccgccctggttcacaatctagcctctaaggaagtcaaaactgtggtattcgacgacgtggcggtggaaatctcgatggccctgctgcagttcttcaactcggaaccctcggaggagcacctcttccggacgatgaaggccttgtccaagtttgtcaatgtctccccagatgtcccgcagttcatccagatgatcggaccacaccccaaaacgatgcgaggcaaaagcgagcgaatcaacgagctgattgatcagatttccaaaaaggttcgctaaccggcttccttccccaactctcttttcccaaagttcggttcatttagatagttgacaatttagctgtagaaccaccaaaaacattacacaaacacactacacattaaacccctaggcagtcagtcagtacgataagttggacaaggaatggtgtgttgatcgaaatggattatgaaattcttcgcgccatatttaattttcttccggtccacccttccccatacaaaaaggaaatgtggagcatatgcattttcaccgctagtggctagtggacttcttaccccaacaacgaaccccacatgttctagtgcaatatctggctaaattagtatcaaccgattcgtttcttgttgctcctcttgcagaaggaaactctgtaactgttaaacgaatggcgaagaacggtagtctctgttttcgacgcgatgacaagtgtttttacttttatttctttggttgaaactcgtactaacgcattatacaaacaatatatgatatttttattgaaaggta

SEQ ID NO: 1168 - DNA, 2374 bp, Aedes aegypti
gtggctggtgtttgggcaagatttcataaaccttccatcacagatgtattagatcgcggctcaccatccatccaacaccatcgacagtgacactcgcttttccaaacaacaagacaaacgcgccgccgccaatggaatccgaagcgaaggaagggccaccggaagtgcgggccacccgctcccggtcgagaaccccgctgaatctgcgcgtcagcgtcgaacgtgacttgaatggcggggaagcgccaaaaccggaaaaggtccagaaacctccaaacgttaccacaatccaggaagagttgaactcttcgcaaaagtcaacctccgcctcgggaggttcccgctccgtccgcaaaacccgcaccgttacgtcagactattcttctgatggtacccgccaccaccaaggaagtctcctccaacccagcaaaggacaaatccgttacggttacaaagacaacagtaaccactgttaccacatcagcttcctcctcatcgcggacgtctccctcgaaaaaggaaatccgccagagtgagatcagtcgaacgttggaagacagtcaaaaggctgttctccggaccagcactcccaaagccacttccaaagtgtccaagaaaattacactgactcccgaggagttgcagaagcatgttgcctacaaagagtacaaagaagccggagagtactggaacaagttccccaagacagactacacctattcggagttgtctccgttccggcgcgagcttgccccggggatgattgccatgccgaacatgtcccggccagggctgaccaagcatgccgagcgcataagcgtgatgattgagcgaaatcccacccaagagtcgtacattcggcagcgatatgctgcgtccaagtattccagctcaggagtggccggagggagtttcgcccgggctgacccctatgattccggcgaggaaacgctggatctatcacaactttcccgagcatcgcaaagttaccgcagtaagagatccgcctcgcatgtacaggtggacgaacatcgttcgtttgtgagtcgctttttcctgtccattgtgaacctgttctacagtgcgacgcattcggtttcgagggtattcaaccagtcggaacacaacttgtattacacgaggattgaagatgagagaggtttcttcgcaaaaatttactccttcttcaatatgctggtcacgagtatcttcaagaaagtgtacctcctgatctcatccgtgctgttcatggacacttggctgctccagagcgcttccggtgacgttccacaacgcaggaggaaatttttgcgcttccttctgattttactgcctttccttgtatgcggtggaaccttacttttcgtagatctcagtcattggttcccagaaaacaccttccagctccccaaattcgatttcaaactcgatcttcccgacgctgaaccggccaaggcatttgtcttggaaaagtgggactcggcacgccttttcactgagcactatttggatgctttaaagctcgcctcccagaacggttttgaggaagctcgtaaaatctggcaggagaacgtcaaccatcttttcggttaacggtggtggtcctacctgatttgagttgattttatgaaccttctagagttttgttttaaccgcttcatcacgtggtagcgggcttatatgcttctatccaagtaaccaaatagcactttagtgctattatacagctgacaggccctatactagcagtataatagcactataagcacaaactcacgtattagcagactagtggttacttggctatcttcaagatttgagtgccattttcttattcgttcccgtttgaggggaatcgttccctcctattatcccttcccaaactcctctctgatcccgagtaaatcatcacatgaacaaaaagcgcaacgtccgtaacagagtcggtacttgcctcacatcacgatggagccactagctacaacccttcaatcgcttgaatgagaccatgccagatgggacactgttagccgaaaaagggggaaagtgcgactctcttttgaaataagctcagcatttacaaacaatatttaatcatcgatgataatataattacaacatattgccatttaaaatgccgcaaatcagtcggagaaggatagagaggactacgtccatagcatctagatctaatttagtcaccgtgttgttttgccaatgtaaatcgtcaagttcgaattgagtagttttcgtttagcttgttgaaattgttcgatttcaaatggaaagtttataataagtttcgaagaaaacccgtagtgaacgtcatctgtaaggtagatttaaagaaaaataaaatgattaacttctaaaa

SEQ ID NO: 1169 - DNA, 2739 bp, Aedes aegypti
agggcggatcgaattcaaaccgggtgcggggataatgcggcgctgctaacgatgagcccgagaaacattgtgcacgtcgtggaagagaacatccgcggcaaagtcagctggaggaatctgcccctagaactgcggaaggccctgcatgacaatgagaagcgctacgaaaagttcattctcgagtacagcctcaagaaccaacttcgctatcgcggcaatttagtgcacaccacattcggcaatgagaagttatactacgaaaagctgatcgaggagaacatcaaggccctgcatctgtttccgtatcacctggccgacatagtggccaaagggctccggttgacgcccttcaactactacatagatatgctggtgttcttgttgaacaacgacaagaactacgattcgttgccaaacttcacggcggccgactgtctgcgggtggtcggaattgggcgcaacgagtacctaacgatttcgagtgatttgaagacgagttcaccgaagctgttcttcaagcgtaatccgtactatctgctgcccaagttcccgaggcggatcgtgatcgagccctggtggaaggtggaagtcggttacgtgctggagagtgatgtgcagtttttgaaccaggacgagttgtcagtgctcgatcgattgatcgattatggtgctcagacggctggggcgttggactacgaagtggttcacagtttgtatcgcaagggattgatctatctcgatgtgccaatcagcggagaggacaagattagcatacctccgctgcagaactttgtgatgaatcgagtcagtggcgattactttgagaacttgctgtacaatgtgttcgtcacggctgatgagcagtctacaatagctgacttatcaaacattctgcaagtcccactggacacggtcaaacaagctacatcgctattttgccgcctcaattttgcccgtcgcaaacaatccagcttcacaaacaacgtggaaccgcacgaaagctggagaaatgccaggcgtgaccaacagcagcagcaaactggccgcacgatcttcaactatcattccctgctcctcagccaagaatccgtggaaagtgaacaaagcgagcgtccagctgatctcactattggttcgctcgacagcccaagtcctgccgaagaaagtcccggcgactacagtaacctctcggatgccaaacccgaggagttccgttcgccggacgccaaacgagtcgggttcgtcttcgattccaccctcacggctttcctcatgatgggaaacttgtcgcctgggttaaaaactcacgccgtcactctcttcgaagtgggcaaactttgtgacgaaggaatgaacgactttctgcgcgaattggagaaagtctccattctggatgccgatggcgaaggcgaggtcagccgctacttccatcacgccataattctacgctcgacgattgtcgcactgaaaaccgtcctcaacacagagttggatctcctccgtctggaaagccttgaagccctcgatcagaagacccgaaaccgtctcctagagaagaagtacaaatttcttatcgctgccgcccctctctcaggggtcctctcctcaccgttcaccattccgttctttggccaattctaccggacgtccaccaattcacacatttggtccaagctgttctactaccacatgggcggctatggaccgccgagcctgctcctcaccaagggaaccgtcctgacccatctgccgcgattgtttctcggctacggaaaacttctcatcacaattgtccacacggaatcgttcgtgctgaattcggaaaagtttgcttcgctaaacgaacacctcaagaacgggtgcgtgcttatacagggctacggaatcaagcagccggccgagatgcactacgaagtgttcccattcgaagctggaaatcgtggttcggagtggttccgacactcagcggtgcggaaactggccaaggtgctggatttggagaatagcttcggctatatgacgttcatccggacaggagtgccggattatggctgcgacaattacgacgagaacgttcatctattcaaagaccatcccaaaagcagcaaggaacgaaagcattccgatacatcaaaaccagactgtccgaagcctaaggcgacccgctcggatacaatcagttcgatcacatccattgaaagtgacgacgccagtctgatcgaggacattcgccggatacgggacatctacgaagggaaggtagttccggagccggatcttcccgaagatgacgaaccagctgtccaggcgacacccgtcgtggattcccagcatttcaacccagaaccagcgcccagtccagatcacgatttgatgcaacagctggccgatgccagccggaatgttgattcggattcggattcgagggatcgattgggaggaaaccgaaaggaggagtggaccctactggatgtccatttcggcattccactgttcgacgtagactgcaataccagcatatgtcagcatgttattaaaaagctttgctcggaggacaagatcgcaaccatccgggaggtcaattctaaaatggagcattcctacctgaagtttatatcgcaatgtttgtactacgaggacgagagtatggaattggtcaaaccgggtaaactggttcccaagccgcgcataaatctggcgttcgaaaacggtaaaatcatcacctggaacggaaaatag

SEQ ID NO: 1170 - DNA, 204 bp, Aedes aegypti
caccactggaaattgtgcgacagcgtttctcctgcgaagacgaaaaaaggggcattagtcattactcagagcaatcgcaccacaagcaagcagaagataagctgtaaccacgtgatctcaatccatcctcaaggcagtttccctgttcgcatcgcctcatcgtttagtattcacaataatgtacatagcgaatcagcgtcggaa

SEQ ID NO: 1171 - DNA, 900 bp, Aedes aegypti
agcggagttgacattttctaccagagacaaacaaatcgatatttaaaaagttactacacaaggagcaagaaaagtctttaacgcaattttgtatttatttttaacttatatagtattaaaaattatatatagttacaaatttacaagttaacaatagtagcaaaagggcaaataatcctaaaaaacatgaacaacaaagcaaataatggttatccgtatgatgcggctcaacaaggcgcatatcagcaatatgtgaacagccaaattcccgcgcacgcacagctaccgccatcttacaactccgtggtaacgagcatgacaccggccggttatccaccgtatccgccggggattgttcaccagcagcagttctatccgaccagctggagcgtgaatccgtccgcaccgcaggccgccccgatgcagtacgctcctcaccatcttcccccgccgcccccgtatgccgctgccacccaacaggcagccgttgcggccattccggctcaatccgtacatccgacgatgtatcagtatccgattgcgaccgctccgcaaccacaaccaccacaagtgtatcatcaaacgccaatgtatcaggtccagggtgcaatgtatgacgcaggggcacggttcggcaagtccggtgggtcggcctcgattccccctccgccacctggaatcgcccccaacgcagcccagatagccgccatgcaaggccagcaggttgtgatgaccaaaaagaagaacaacttcctgcacggtggcaacggatccggttttacattctggtaagcaccgaactcttcggcgcaaacgtgtttcgttctgcgcgctgctcatagcggtcacccagaaaaccacttattatccagtgatgccgtagttttctagtatactgat

SEQ ID NO: 1172 - DNA, 1626 bp, Aedes aegypti
atgaatacgacgctggacgacagtggcagtacggaatggtccactctgcactgcagcaaagatgcactgaccgactttttcggttggttcctgcagggcatcctggccacgctggccttcacgtgtctaatcggtaaacgattctgcgaaccactttacaacagacgatcatgggaaacgtggtggtacgatacatcgaagcaaggtatcggcgccatggtgatccacatgaccaacgtctacctggccccgctattccagggggatccctgtacctggtatataattaactttctactggattccactatcggcctattcataatttatatcggcattaaaacctgtcagtatttggcgcggaagaaaaaatgggatgcgatcaactttggcgagtatggggctcccaaatcgtggctttaccagacctggatctacgttggactgatggcgatcgttaagctaataacgactctattcattcagctcgacatctgggacaacgtgaaaaactttgtcctgtcacccttcaaggatcctcgcatcgaactggccgtggtgatgttggtgattcctttcttcgttaatattctcatcttttgggtaaccgataatttcctaatgaggcacacacgaaaaaagcgcaatacaggtactgcacatcaccacggaagggaacatagcctgttgcaaaaagtaaaatacaaaatgatacaaaaaaccaaacctaatgactcagaatctgatactcttttatcaggcgatgaagaaattttaagttttaaggcgtccaacagcgccacgacatcgtcgtcgcttctgcaggggtccgcaagctgttcctcgacggcgctggtcgtggacgatacggcaatcattctcacctcttcggcgacatcacctagcagtaagcaaacaactgtccagcagcgaacgagtgtgatcaatatttaacgaaggttttgtttagttttgcttatttgcaacaatttttacctatatcgtatctgtataagtcatgtatagtctgaacaacgcatcatcccccagccgggacgacacgaaccactttttcattgttgaaacagagggaaatccaaggcaatagattagctatgatttttttttcttgttgaaactgagagtaaaaacatgtgatatttgtgtgtctatatctacatatatacatatttacatacatattcaaggctacgtaaaccattcaggaagcttagaaattggaattgacggatatcaaaatatccctctccataccacaatgttgttgaacttaattacattcaagaaggtattgaaggagcaacgataggcaaacagtgattggatattagcgcaagagattggtaactgatgtgaaactgagcccacttacttaggcaagtcgagcagatgattagaattgagaaactgtagacgaaacacggatattgtattttgtagggcaatgataggctaagtcaatcaacaataaactattgagtaaccagcgaaaaagtcgaactaggaaggattggttttattttttttatatatacacaaacagacatcaaaagattatatcaacggcaggagaaaaattgaaagaataaaaattaccatttgaat

SEQ ID NO: 1173 - DNA, 1285 bp, Aedes aegypti
ctcaagccaaggagaacaatattcattgttcggttcaatcgcttcattatcaaccttaatcacgtatcggagatctgtggccgtacctcgctaattgagtcagcaagtgaaactgcaggtagtgaccgatttcgattacacaatcaccaagcagaggctcgaaaacggggagaaaatcctgaccagcttcggaatgttcaacgagtgcaaatcgctgcccgagtacgtgctggaggaaaccaagaggctgttccataagtaccgaccgatcgaaatcgatccccacatgccgctggacgagaaggtggtctacatgatcgagtggtggtccaagacgggggatctgttgaaaggctttccactgccccaggaggaaatcgccgaagtggccaaacgattcaaggacggactccgcgacggcacccaccagatgttcttcgacctgaaccaactggaggtgccgtgtttggtgttttcggccggtttgggcgactcggtggtgtcggttctgcgacaagcgaacgtaatgtatcccaacgtgaaggtgatctccaatttcctgcagtacagttccgatggcacgctgaacgggctgcaggacaagatgatccacacattcaacaagaacgaaacggccctcaaaggcacggagtactacgatctggtgcacgatcgtgaccacgtgatcgtgatgggcgattcgttgggagatgccggcatggccgatggcattccctcttcgtcgtacgtactgaagattggatttctgttcgatcaccccgagcagaatctgccgcgttacatggagaccttcgacatcgtgctaatcgacgaccagactatggatgtgccgcgggcgattttagaaatgataaagaacaaatctcaccagtgaacgcgacgtgcttagatcttgtgtaaggaatttcaaattcacaatgacatttaactgtcgacttaattgttttattttccatccatttgtgatcgatgacgatcatttgatgttcgttttagaagagcctaccatgtacgagtctttttttatattgtaaattatgagctgaaatcagcacaaagcagcaagaagctaagcgaatagaattttctgctgttccgtaaatagtacttatttgagttaaatttggaacgactcaaaattctattttttgcatgtgtgtaccaacgtatgattatagttaaatcgacttatgaacgcgaactgtcgtaaattgctgttattaggggctttgtgatctgcacaaaatataaaaccttgttcgtg

SEQ ID NO: 1174 - DNA, 1119 bp, Aedes aegypti
atccagatgcgcttccagcaacgccaacagcaggagcgggaccagcgcaaagtggaaatgatttccaccacaaaaaccacggccgcagccacggccacaccggcaccggcgccaatggtgacctctcggctcggcgctggcaaggtacggcaaatgttcgacgagcggcgccatcgggtggccggaatcgacaagagctatcccctgcaaccgattcaacagcaaacgcagcagcagaccggcaggaccgctaccaataatggcggcagtaacgtttccaatggcaactcggcgaagacggcggcggcagggctgaacaacaagacacataccatttctttcgacgacgatctcactctgactccaacgcctgctgtccggaagctcccgaatgtgggcaaactcaacgtccagcagcagaacgtcaacagcctcaaactgaaaccggtcccgggaagaacccccacgacgccggcgtcgtccacagtcaaaactgccagcagtgcaacgaaacccgttaccaaaagggccactccgatggcaagttcttcatcggctcctgctgcaccggcacagtcatcgagtagcccatcgtccgctaaagtgaacgaacccgttccggacggtctggttcggtgcaccatctgtagccggaacttcgccgaagaccgaatcgagaaacatcgagagatttgccaaaagaccaagagcaagaaacgcaaggtctttgatacaacaaagcaccgagtgctgggaaccgacgccgaaaagtacgtgctccagaagaagaaggtcggcgctgcggccagtaagaagtccgtttccggaccgtcgactgctccaaaaggcgcggacaatcgccgcaagagtgactggcgccgaaagcacgaggagttcattcaagccatccgagcggccaaggaaatgcaagcccacctggcgaagggaggcaaactgtcggatttgccgccgccacccccctcggagaacccggactacgtgcagtgtccacattgctcgcgccgcttcaatcagaccgctgccgaacgacacattccgaagtgcgccaccatgctgcacaacaagccgaaaccgaccgcgaaagcgaagagattctaa

SEQ ID NO: 1175 - DNA, 231 bp, Aedes aegypti
atgaatgtgtacatcaaatcagtagtctatctagtagcgttcgggggcgccggttacgtcctttccgaactgaccaaacccagcaaggagaaaatcgatctactcaagcggcagcatcacggagggccagcggcatcagaggcggccagcaagaaggcgctgttcatgcagaagctgaaggaagccagcgaaagcagtgagcctatctacttgaagaagaaggctgattaa

SEQ ID NO: 1176 - DNA, 1587 bp, Aedes aegypti
atgatgaaattttgctgatagcccatttattcttaatttggccttcttgatagagagcaacgacgatgcaagtattttacttcaaagcattactcttagtgcagattttgcatgagattcgaggatcgaccaatacgccatatcgtatttatgaaatggtaccggaagggatctgtaagtctcggcggcttcccctgtttgataatttgcttacccaaacggatcctatacaattaaaaaaccctgagaggggcgttattttccggcaaacctggaattcatcatctttcaagaggtttggcgattgcaagttttacttgcaggcacctccaagtatgggtctatacctgaccgttagtattgcaaaactaagaaagaatagtcgtggccattgtattgatagtattgtggtcaagaaaagcaacgaaaaaaaatacgcattttgcgatgcaatggatgatgacgatgagctgaaagtgtatgccgatgatcatgggaaaatgcgagtgactgtaaacttggataccggtttggccttgccaactctggacgatacgctggaggtccagtttattgcaactgttaaacgggattgcaacagcctagaaggatattcaccatgcgaagatgatgaggatgattcctgtatttacaaagattttttcgaagatggatatgtaaactgtcctgagtgtactgatgagaaaggttgcttcaaagagtcagagcaagttcagattatgaatccttccaatgtttttctgagtgcaatcatatccctgttgggaactacgattgtattcgggggttgtctttggtgcctctatagataccgaaattgcattggcaattgcaatagcaacagtgcagatacagcacgcaataatcaaaatacgagaactgtggcagcggagcaaattcaagtagaactgcagtcttctggaaacgatattcagccttctgcgccacccgactacgacaaagacctgccacctacttatgaatctttgtttccggtaaacccatcgggtagaaccagcccctaaccagtcaagatagacaattgatttgctatacttgagtttgttgtttagattaacttgtattattggttttaaattaaatataattagtagatacaacgtgaatggggagatacactgtcgcacctgaaaataagggtaaactcatgccacgtctcgtaaaaaacgaatgaactgaacaacataatgtaattgattcgtaatcttttgcatttgatagtgtaacttttatactagttttaagtgctcgaacgtattcacatttagatctgtgtacacaagaaacaataataatacaatacggtgaatgtattacgaaatcttttaaacaatggccgtttaattaattttagttatttattattaaattctgtcatttcccccgagtcaagcccaaatatgtaggtagaattacgacaaacggagaacgttctagtgttttttattgtaacaaacagaaaacgtaaacgcataaccaattcacaaatgctattgaatgtacatattgaaactgtatgttggaatatatgcatttccaaatttt

SEQ ID NO: 1177 - DNA, 1513 bp, Aedes aegypti; identical to SEQ ID NO: 632

SEQ ID NO: 1178 - DNA, 555 bp, Aedes aegypti
atgctgaacagcaacagtaatgtcaatctcggtccactgccggaaggttgggaggaaggcattacggccaaaggcgaacggtactacatcaaccacgcgacgcggacgaccacctggagggatccccgattgtccaaccaggactgggcagcacaagagcaatcggtcagactgtacaacctgcagctagagcgggaacgcctccggaggcgacaacaggaaatccggtcacatataggggaagacccgttcctgtccgggctgacggatcactcgcgccaggagtccggtgacagcgggctgagcgaatcgtccacgtcccaatcgatgccacacacgcccgatttcctctccagcatagacgacagcatggacgggcttagcatggcagacaacacaatggacacaattgcatttggagataatttagaaacgcccgatgagttcatgcttgacgaccccttgctactggagaaaatcgatgccgtcagcaatctgaacctgattgatccttcgagtaccaagccggataacacgctgtacgatatcatttaa

SEQ ID NO: 1179 - DNA, 3267 bp, Aedes aegypti
tcaattttccacccgtaaacgacgctgactggaaaaaaaatgtgagaagaaaaactgcaagcttgtggatgctggttcgagacggcagagaagtgggagtgatttgggttaacgaagagcaccaaatggaatataaatgttcacacttgcaagatttaagtggaattaaatgtttttcatgcgaatatgtaacgttgtttcattttgttttgtttttggtttacataagaaaaataaatggctaattttattcacaatacaggattttagatctttatgcatgaactaaataattccagaaaaatcgtttccagatataaaatatgtttatactaaccaagtttaatgcgtaaaaatgcatcacaatgagttaatagaccgaatatggttttagaatggtatttaagccatctaatataatattttcttagcgtgtacatattgacaatgttcacatcgaatttccatagaattgacaatctgagaatttgcccttttgaattgtcacacgagaatacactgttaatttgacacagtgcacaggaatagcgcagccaactgttctaaaaatactttctcgttgatttgttgcagtgtacgcatttagtacaaaccgcccttttgtcttttgtcacatgaattttctgccatcccaggatgatgcagaatcaaaacaatccaaatccccccaggaagatgagcaatcctcgcggcgggcagcagagaactcggccgtatcaacagcaccattcgaggaagaattccggagcgccatcagcagtatcgggaggaggacgaatcgcggcgtcatcaagccaccatcgcagtacagttccaaacgtaatcgatcaggaaaaggcactgcgtaatcagattcacatggagatcgaaaagaagtcgaaagcctgttccaatcagtcctacgagtgtacgcttccgcgtctggagcagtacaattactgcaagcgtcatattctccaggatacccgcgccccttacaagcagtgcgcattcttttttgcgtcgaatggaaaacgttgcttggaaccggctccaaagtatgacaacaagaaggactacgggacgaattactgtttcgaacacagccggctgacgcagctgaccaaaaccaaatctaccatcgggaagtacacaccgctggaaacgaccgaaacactcctacacaatctctcccaccatgtcaaggtggacaaggcgaagcagcaaagtcaacaacagcaccagcatcagcttgccaattgctcgtcggcgctgaagatcacggtccacgatgacgaggaagagggcgacctggacgttgttaccccttcggtggatccgtttgtcgacatcgatgtgccgacgatcaacgattcggctcgcgttgtcctggactatgcttcggatagcagtactgatgaagacgccactctggtgggaaacacctggcgagggtacgatatggacaattcggacaatgagagcgtcgattcacagaacgaagatctgctgaaacatgccggaatctacacggccgaggaagccacaatgataacgaaagagaagttgatccggcttcagacgctgtacattgatcagtttcatcgtctgcagcacgttttgaaggagaaacgacggcgatatcttcacgaggtgcgtcgcgaacgggaacagtattgcagtatccacgatcaggtgaaggattccccaaaggagcgtaagctgtacgagaagttgaaagctttggatcattatcatcggaaatatgggatggatgctatcctgcaccggaaatatctggaaaagcgcgccaaagctaccgaagggctgcaccagaaagttccgcaacatccgaagtgtgcatttaccgagggaggcgtcaagtgtggcgagcgaactcttccatgctgcaaattctgccggaaacatatcctcgaggataagaaacaagtgttattcaaatcctgtggagtcgagaagagtggcgtcgtgtgtcaagagcctttggcaaacatctttgaggatgccacttgctacctacatgtagaacttcctgcccagaaaacatttaccaaaaagaaatatgaatccgagtcggaaggggaagaagacctgcagtcgcaggagatcaaaagagagccgctgtcggaaccaaagctcgaaaaacattccccttcgcagtcgtccagcaccaccgcgacagcagccgaaaccgaggatcaggaagtgtcctccgagcccccgctggtcgagcacaacattaccatcgctcacgacgtggaaccgccaagcctcgaggactcccttcccgtgagtgtaattgccaagccgatcccaatagaaaaacccaaccaaacggaggaacccgaaaaggaacagccggaagcgacgccccccgaaaaagacccagtgccggaggttgctccggtggtcgacgcccaggaaccgaaagccgatccagtcgagaagatggccgagtgagggaagaaacgaaatgaaaatgccacttccggttttggtctcaatttaattgatttttattgtatttctttcctttttcattgtaatagtttcattaaatatagtcgcgcgatagttcgaaacgatacattagaacgtaatcactttagaacggttcaaaaaattaaccggaattataaataataataaaaaaaaaactcacctcaatgttttttgtgtctctgcgatagttgctagagtgtaaatttggaataaaatgttttgctataagtcgatcacttgtgttttcttcttctttactactatactgcgtttaagttttgcttgcaggcgggggctgtttgtatttttgtatgcttttcgatggcttagatgtaatgattgatcgggaccagaaaggctgtaatgtgcaatagctgtgggaacgagcgaatagtgatagtcgatgtcaagggatcagcatagtcttttcggagattttttaacagatatgcttgacaatgtcttcttgtagcttcaataaatctcgcttaatttatgataacgcgcctcaagtcattggtatacgcgtgtgtacacggagaaatcagactacccaaaaaatatgttctttaaactcaaatttggggaaagagtatttagtttttacccacagttgggttgtttgaaaaagtcaaaattgaatagatttgtgggtccgcgtagcacgtcgtttcagagcaaatgaacgaatgaacatcgaaaccataactcaagcgtgtgctggaataagggcgtaagtcgcat

SEQ ID NO: 1180 - DNA, 1461 bp, Aedes aegypti
acatcaaatacaaaaaaccacctcttgaagaatcttcagtagaaaagaagagccctgataacgccatccgttcccaccacaaaccttgagcttgccagtttattcacatgtctgtgcacattcatcgcaaaacatcacacaattatctccctcgttattggaattatataggtcatccgttgactgcattcagtgattagtagtgctacttattggacgaagatttattagcttgaagaaaactttgaaaattactgatatagcgatgaatgtagtttcgcttttaggaattatttcctgtgttttcagtgtaacttccgctgtcccattttccggttggctcttaggcgggagacaaaatgaagaaactactgaagcacgacccaattttatgaacaaagtacaacagttgggcgaacgagtgtatgagaggaaacgtgagttcctaaacggtatcaatgaaaaggtgtcaaatatactgtggataccaccgttgtatacaactacggaaacttcgattcctccatcggaaccgccttacgtattccaaagtgatccccaaaaatacacagaaatggattcggacgaagatgatgtacagaacgttgaaatttacgccagaagcagctttctttctccggatgatctcgttaatatcgatgcaccacccgagccgcaaaacaaacctaccataacatataacattaacaaaaacttcaatatacttgggagaatctgggcttaggtaaaacacactaaattatgtatcttcctcctctgtagataatttttgctgaggattctccgaaaagtccacgcggtgtccatccttatccaccacaaccattgggggatgattgcatccgatcatttccgtatcgctcacactcatttgatcagccgctggagcattctcccggaaatccatttgcggtgctgcaatattcatagaacctcatttcagctccacactcttcttcagaatgattccaagttaacttcacctgaatcgatcaccgacgacacgatcagcaccacaaacagcaaaccgataacgaacttcatcgcctgtatgacgtcgtcgaatttaaaacttcaaacgcgctgaggtaagcaactacgcgacttcttcccaatcggacggaagcttgaatcgcactgtttgatttccagtcgaactcgcccctaccgaaggccaatcacggtttagtaaacagttgtcactctcatccatgctgcttccgatcgttatcaaagacagagcagagcgctcggctgcttaggaaatggctcattgtagggccgaacgaatggagcgacgaacgccgaacgacaaactatttcaacgccacttaggaatctcgttcagtggcgttgttggatgatttttcagcaatacaatacattccaacttgttgggtccgctattgtaatagggaattgtaaaaaaaagttgtgaaa

SEQ ID NO: 1181 - DNA, 408 bp, Aedes aegypti; identical to SEQ ID NO: 625

SEQ ID NO: 1182 - DNA, 219 bp, Aedes aegypti
gttaatagtgacgagttgagagaagaacccgaaccggcattggattaccccggcggcagttcgaacagtgacaagattctcgcggaagataacaaatctcctttctcatcattgaataattttgaacgcgcaacaaacggaggagaaccgtcagaggataataaacctagccgaagtattttaacgagagaagttgccccttttcctggtcccgtgtaa

SEQ ID NO: 1183 - DNA, 252 bp, Aedes aegypti
atcgatcgtctgttggccgaaaaccggatgcccatcatagtaggcggaaccaactactacatcgagagcgtcctctggcaggttctggtcggaagtggcatcccagctgatcaggcggaaaaagtgttgctaatgacaacggaacaaatggaacaactcgagtcgacgcttttgcacggcgtactgcgacgggtggatccagtcactgccgatcgtctgcatcccaacaacaagcgcaaaattgtcaggtga

SEQ ID NO: 1184 - DNA, 2203 bp, Aedes aegypti
acttctcctacctctttaacagcaaaatgcagaacaccgcagcagctttctggatctggcggaccctcaacaggaacaacataagcaacccctcctgactgcatccaccgaaaatattccgtttatcgatgtctgtgatactgatgctgtagacgatcaaaaaacaccgccagaaaaggaagccaatggcgataccaaccccaccgcaaattcattagcagtcccattcgatcgatccacggccctgcgaaagtcctgggaaggattcaaagatatcatgggctccgcccgaagaaccaaagaacttcaaaaggaaacggaaaagatccaactgtcagcggattctagtctcgacgaagtgatgaaggaaatcctccgacagaagcaaataaggacttctgcctgggtggataccaacaagggacgcggtcatcagattactttttcgatagagtctggccctcggtgcgacgatgtgatatatatgctgtgttcctggggcatcggtgaacggtacggttcaacgatttccatcgcttcgtgtacgctgttcaccgagcaactgcaggacgaggaagacgagaaacaggccaacaacaaatccagcgcctggaatagttttctcacctcagctcgggcacagctcaatgtggcatcgatcgtcgacaacgtcagaaatggggccgtaattacgtttgattatgtgaccatgttgataactgctgctattattgctgcattcggtctgatagaagatagtagcgtgaatctcattgccagtatgctggtgtcaccgttgatgggtccaatcctagcggcagtgttcggaactgtaatcaaagataggaatctgcaaatgctgggaattcgaaacgaaacaattgccatcggattagttttgttgagtggattcttcttcgggctgatcatcagcagtacggacgaaaagtggggtctgggtgagggcgtgacggcggaaatgctggcccgctgccagacccattcacttaaactgggcattgccatcgcgctgccatcgggggccgccgtagccgtggccattctcgccgaaaacggtggcggacttgtgggggtggccatttccgcttccctactgccaccttcggtcaatgctggtattctgtggtcactttcgttgctgagctcgatctacggaaaagcaccggaccgacgttatgccaccgtgacacaaacgaacctctactcggacacccaatcagtagagctattctgtctcggttgtatgagcttctgtcttactctggtgaacgtgtgctgtatctatatcatgggtatcttcattctttgggtcaaagaagtggctccgattattccgaaggatcagaaacaattctggaaccacgacatcaagattgcccgggattacaacaaaaccatgcacacaatggacggaatgacgatgaatcggcaattgcttcaggagctgtctcatttccgtccccacggcgaaaccgataagcagggctccgaacggtggcttaacactatcggtcgtgctggccagaatacctggtccccgaggcatcttcacaatacgcgtgaacatcgaccaacgatccaagagctagaggcactctacctcagtctgtctgctaacactagcgataactcgagtcactatcctcctcaccacacgactcatcaatttatgaaaatcccatcgtcatacctacgatcatcaaagccctggtctccacccaaattttcctccgccgaagcggagcctttgtcaccaggaggccattcgaatcgttcaaaacccatcgaaattgggttccgacgacaccatcggttttcggattcattccgagctagttcagcacccctgtcgaaaatcttggaaaatgtcgcttccgcagctcacggtggatcgggcgaggggccgtccaatcgacaaagtcaaaagcacaagaacaaattcatcgtcacccccgcagtcgatcccatccacaagtagtgctcaaatgcgaatcttaactggcaagactcgtcctcgcgttgtaaaaaaaatatctctgtatagtattttactctctgtttactgtttttgtattagttcatgaacatctgtttcgttaggtccaataagtttgaagcgaaaaaagagaaaataataaatgttttcaagctttcaaaataaagtacaagctagcgaaaccgg

SEQ ID NO: 1185 - DNA, 2463 bp, Aedes aegypti
atggaaaatcgacggttctttaatcaggaaggcaaggaagcgaagaacttttaccatctgtccgacgacggagaggaaagcggctgcagcagaagctacatgcggaagccaccggctcacttgaaaccacgttcgctgcagagtgcctcgcaaagcaaatcagctgcaaaatcgtccgctccaagagtgcgatccgcttcgacgggacgggacaaaaagtcggaacttcaagcccggtactgggcttttctgttcgggaatcttcagcgatctgtgaacgaaatctaccaaacggtcgagtgttacgaaaatttgccctcatgccaggaagcgattctcgtgctggaaaactacatccgagactttcgggcgttggccgaatggttcaaggtttcttgggattacgaagcgaccccattgcctcagcgtccacaatcgctggcttgggaggtacggaagagcaatccggttccacgcgtccgcaaacccatctccagtccgggcatatccggcaaatcgagtccaagcttctccggtaagaacagtccaagtcacgcagtggaagatctgaacaaatgttctccgaaaaagcacttcagttccacggagagcctcagcacgaagaaaggctgtgctggattgggaaagctgttggtcaaagatatgataaaacagtccgtaggggcaaacgagaatgcagtgctggacgaagcgcagaaaactctccaaacgacgggagagaatgaccaccatcagccgattggttgtagcaatatcgatgcttatgtacttaaactggatcagtacacgcagactaatttagatgacgaaaatctaacgttggctgaatacctggaaaagtattgcaagaaagaggaagatgttaaggaagttgtgaagcaggatgaagtcgttcaggaagagactaaaatcgttgaagcggcgcctcaggaagataagaaagttgctgaacctgttaaggttcttgaaaaggttctggaagctgcacctaaaaaggtcgcaccagttacgaagtatgcagctgtagtgaacaatgctgccaagcccttaatacggcaagctggtccagtcgttcagactaaaactgttctgccatcgagaacggttccttcgaagactgttcgaaccgtgctgaatgtccgcaagtctgcaaccttatctagtctcagtcagagtcaaacgaaaaccgtttcgctcccggctaaaagtgcaaccatttcaaacatccattccacaggttcgaaacctggtgctcgtcccgtagcaaatccagtgagaagcaaaaccattccaacgaatgtgtccactcgtctctcgacacgttccaaaacgatgatagaaatgaataaccgacggaacgacagtaaagtggcacctttcccatcaaagctgtcattttcgcgcaaaacctctagggaagacgtcgacagttccagttctactttgaaagccagcaccgatcgattgggttcaaggaattcagtcatagatgcttccaagtcccgtgttcagaatggacccgctacgagtagacgttccgaaccgaagagcctcccatctgacgccgccaacaatgacggatggtatacggtgaagacgaaacgacggtcaagtctccactgggcaactaggttcaatcaacctagcggatacgcaagccttcctacgctttctctgctggatgaaaacggcaatgccgaagagaatgagcctaaggaatctacggataatgttaacaagtcatcgaaagtagaaccgaaagttgttaaaccgagtattgcatcgaagactccgcctgactccaaaactaaagcgacttcaattgctaatgcaaagcccacgattcctcctactaaagccgtgaccactataccaccaaagcgacccacaacagcacccgcagtagcgaaaagggttgttccgaccaaccctccttcagcagctcagccaaagcaaccaacactaaatggtccaacgacaatgagccgacaaaaatccgatctcaccggtttgaagctaaaaaccttgcacaaggaatttctccgtaatgaaaaaatgaaatcaaaacctccggcagcaccgatcgtcaacggcgaaccagatgaactggccaagacagtcgaagaaactgtcccgatccccccggaggataccatgtcccagttgaacaaggtcgacatgaacatccaaacgaacctggtatcgtccaccatacaaaatctgtacgagaagtgtcttggatcgagtgacgatggcggtggagatggcactgcaatagtcgtcggtaaagcattgctgcgatcggaaattaacttgtccagttgcgacgagttggaggaacgggaggacatggaaagcgacgaggatcagcgtaaactgttggaggaacaggaaagccttgaagcgcaaattcgggaactacagaatacgggtgagtattaa

SEQ ID NO: 1186 - DNA, 4342 bp, Aedes aegypti
atgaatctcggtctatggggatgcttggtgccctgtggactgcaatactggtgcgagagtaaaagcgatacatgcattacggagatgggggcgacggcatcaactgattgtcccggtgccggaggtcccggcggaattccgggcctgaccggtgctatcacgactgcggctggtgctacgactacgactcctctcacagccggtggcattggtggctcaggtgctgggatgctgggagcgtacggacccgttggtggaccacccgttatcgtacgggagcggcggaagaaggtcaccgggtttgccacactgaagaagaaacttattcgacggagacgatcgtcgaaagcatgcgatcatggccgggtgctgcgggaattcgtgtccagctggagtccgatggaactgtcggcactgttggaagagtacgaatcgctggcagcactgaaggacctttcggttcaggctgagctggcacggccaccggcaaccacgttcaaacaggatctcgccagtttgtacgactacaaacattgcaccgactgtgatctagtgttccggggaaccgtcttcccggttcaccgtgcactactatccgcacgttgtccgtacttccgggacctgctagccggctgcccgggctacggtgcccgaatctgtttggaattacgctcctcgccggtggacgttccaatgttttcgtcgctgctaagatatctgtatacaggagatttatgtacacacgatccgaccatagatgtaagtctgctacgtagattaggagaagattttggcacaccgaatccgctagaaaatgacctgcgctacctgctcgaaaccggggactacgcagatgccgccatagtgttcacctccgagggtggcgactaccatcggcccgattctggcagctcggagtacggttttcgaccgaagctagaactaccttgccataaggcgatcctcagtgcacgatcaccattcttcaagaatatgatccagcgacggacccgtaacattaacgaagaacaccaacttcatggcacagaccgatcgttacatgttccgacacgcatcgtgctggatgaaaccgtaattccgaaacgttacgctcgtgttctactgcacgcgatctacctggacaccgtggatctatcgttgatcttacgcggaaatggatgcggcaacggagcaggaagtctcggagaggtgcaagctcttacccacacagggagaaccaggccgtcacctttggaagaagccatggagctgtatcaaatcggacgcttcctcgaactggacattctggcacaaggctgtgaagatctgatccttgaatggctaactttggatacgctagctacggttttacgatggggtgggcaaccacacgggtctgcctgggtttatcgccaagcttgccactacttgcgcgaagagttctcggctattgtcggatctccggtgctcttccagcttgataaatctcagctgatagaagcacttcaaaacaacttccttcaggcatcagagctggaggtgctgcaggctgttttgaagtggggcgagcaggagctgatccgacggatggaagatcgggagccaaatttgcttagtcacactgcacactcggttacccggaagggaatcaaaaagcgtgatttgagcgacgtagagttgagggaaattctatcggagttactgccgcatgttcgaatggaccacgtactgccaccgagcaacgagatattgaaccaagcaatccgacggggtttggttagcactccaccatcgcacatgatcggagacgatcgtgagagtctgaggatcaatgcgtggattcgcggtggaaagaaccatggtttgtttgtacgacctcggctgttcatgccgtactatgaggaggttaaggtgctgcttgaggatcacattgcgtcgcaacagatcgaaatgttgcgcatgcgacgatcgcgccacatgccggacattccggacacgttgtacatggtgtctcgacttaatagtaacactagtgggaacatgggtggcggaggcacgtcaggtgtggatgttgttgcggcagcggccgcttcgattccagcaccagatccaagcgccatggaagctatgcaaaagagggaacaaaagcttaggcaagcacctagctgtcaacgagcgttgacgcttccgctgtcaagccggaacgaaatcaatcgtcagatcaggttgcgggttgttcgggaattcaattttccggatgaggtggcagagttgttggagaactccaattgctactgcctggacgcagatggctccacaccgaaagctcagggcgacgatatccatgcgagcaatcattcattggacgatgacacaactccgcccccttcgccggcactgccaagtgatattattccacaaaacgttgcctgctttgggcgcaacatgacattcccccggcaacaacctcaaccaccaccacaagtgatcgcgcatggggctggaggaggaggaggagatatgggaggtggagttggaggacgactacatcatccctcgggtggtatgttaggaccgagttcaagtattataggtacccatcgacgccaagaactgccatcgttgatccccggaggggatgtagttgcttataggctgtcagcaccggccggagatcattccggggaggccggagcctgttcggagggacatctttcggatataatgccggacgtggccatggcgacggcatctatgggacagttgcaacttggagacatgcccgagagtcttcatctagatctgggcgatggaccaagtcacatgatcggagcagcaggatctctaggattacataatcttccgcatcatcgaatagcgacaccttcgccgagcaatttccatcactacatgacccggagccatcctccgtccggttcactgagtagtagtggtgtcggtggcggccacggggaaggcgcagcggaacgtggcatgatgggtggtggaaggctacccagttccctcggtggatcctcccagtcgggtcagccgggagtatcagctgcttcggcggcagcagccgggtcttcgtcgtcatactcgcagcgttccaactcaccgtacaccttacaccgagcgagtccgggcctgccgcatagctcatatcacaccggcccccgattatagagacggctgcaagtatttcccgacaaacgtcagctgttcagtatgcctttctgaaaggaacacactgaggagaatgaggagcggatgtgtgtgcgtgagactgtctgtaagggtgtgtgacggagaggaatggagtgcgacccggggcgtagaggtttagttaaacgaattaactaaattaaaacacaagtagcagaaaaaagaagcaaaaacaaatacaaactactacacagtaaaaaaggaaggtaattaattgcaacaaatacatagatatttgaattaagagttaagtatttcattaataaactcaagaagaagaacaacactacaatggcaaggatataaaagtaataatagtactaaaataaacacaaaacaaagcagtaagaataataatcgaagacttttatatttaacaaactacaaaacaaacataggagcaaacccacagaatacaagtcgacggtgtaaacgagaagcgaattgatagcaaagaggaatgaggcataaaacacacaaacaccaggagagcgacgaaccgcggtttgtgtggaggtagcagtagtgtgtaatcgagtttttgagttcgcttcttcggcgtacgaagcgaagcgagataaagcaatcgttcacacatacgaatgaatgaccaagcgatcgcgtgcgtaaatcaacccgaatatatgaacacacacacacaaacaatcgtacggatttttccttggtttagaaactaggccgtgcctttaatttattctcttttacattttttagcaaactttagcgccccttcctttcggatccctcaaactctcgagggacagtatgataatcagatgtgttttttaatatgagatgaagttttaacgctatttatttatctttttttcgcgatctgttttttttttacactaggttatgtaggacattttttctcaattgggaaacaaggcaaaccaataaaacaaatgttattacgattgtgtttagatttgcccttggtttccgcgttatacggcaacggtagaagtagtaaaggaaattcgagtgaatgagtgagaatgcgagataaatgaagcaaaaaacaatttcatgttttcgaataatcgtaacatcaagaagaagcaaacaaaaatgcatcgttcgtgtatgt

SEQ ID NO: 1187 - DNA, 2772 bp, Aedes aegypti
atgttgcttgggaaaccgcaaatcccggcgtctgtcatcagcagcgttggcgcggttaactaccagcaatcggcggctgcggtccggcagctgtacgttgtggcaccgactggctatgggtccggaggcggtatcggtactgccttcaacgccaccagcagcaacgacaatgtgaagggtcaccccctgccctacagcaacagcagtgctagcgaaagtgccaatcataatcaccagcaacaacatctccagttccatcaacccgggagtggtagcaccagcaacggtagccataagatgataacacaaaccagcaccggaagctcctcggcggtggttcacagttccgcagcatcgacgacgacagctgcgctatcggtggcaacagccgcggccaacaacagcaacggaagtacaaatcaaccccgccagcatccgaagaagcgcaagttctacctggccgacctcgaggagatggaatcccaccggggcagtgcaggttcctccgggccgccattgcaacccgtcgacacaggaggaacatcgctgctaaacgggagcaatactagtaacagtactgtaaatagtagtagtagtaacaatcttagtctagaaagcgatcaacatccggtaggcacgagcgaggttttctcagcagcatcgggccacaccgaacttccaaatagtaggccaccgtcgggctcttcggcatctccctcggtggcctacagcagttgtagcggcaacggtaacaatctaggtgcaataataaccgttacttcgatggcacagctgcaacagcagcagcatcattcgcaatcgatagcgatgaacgaacgtgtcagctgtagtagtcccagtagtagcaacaacagaaataacaacaacggtactatagaaggagctaggcttcattcacagcagggctacgatgccatgcaacaacagcagaggcaaacggtgatgtctgcggattcggcgaggtcacaacagcagcaacagcctatgaggatacagcaaactgccgatgggtactacggcaataagaaaatctataccagttcttttggagatccacgcaatagttcatcaggaatttctacagaagtttcatcagaggcatttgttatagcgatactttcagaactctcacctatcaacagctataagcctgctgccacgcctccgtcttcgatgccgcagtccattcagcttcagcagctgcagcagcaacagaataccgtggggtcaccctcttctgtccatcaacagcagcagcagcagcagcatggtccaccctccagcaataccccaccggacacgggatcgcatcacatgagcagtacaccgccagttgccggtttgatctcaagcaacgctactacctcgtcctccggaggacctccacccccgccacccacgtcgtcctcgtccactgcccagtcgagttccggcggggcggctgcaccatcgagtttgatcgatctgaacgactgggccaccaactatcgggtgctggccaggcggaaagactactacgagtccggagtgatacgagccacaccgtcgcccagcacggtcgtggtcctattcgactacccggagggcagccagcagaagtacgaagatgtgtttggcgctggtcgctacgacatcatcgacgatgcctgtccttccgcttcggatgtgggccccggcagcagagtgtgcgtacggcttcaaaccgtccccgcatatccaaccgggaacgtttacgtcgaggctgtggttaaggaaatgcataatagtactaagaagttttcggttcagatcaccggagccggcggcgggacgcaggagctcttggttaaaagggtagacattcgattgttaaaaccgccttggtgggatgagctggaagagatggtggaagcagtggagggcgcacggaatcgatcacaacctacgccggttagtagctccggtccagtgagctacccaaatgcggacatgcctcaagttccgtcgaatgccatcgtgtacagtcaaagttcagttcccccggtcagtgcaacgggtgccccgtacaaagccatcagcattacgcaaggacgtgcaaataatcactatcaagcccatcacctctcccagcagcagcagcagcagcagcagcaaagcgggaacgaactggtggcgcctggtggcccgaatacagtattaacggctggcagtccagacgatttgcatagtgcaaatcgcaacttctacgactacgatagcgacgacgaactgcgacgaggagaaatcaactttccgatggatggtgaaaacgaaaaatactcaggcagtagcaagagaagcagcatgcaaagtcgtggtagtacgtctagcttactggaccagcgaagtactcccagatctcaaccagcaactccaagatctcaagcggcgacgccgcatcgcttcaagaagggcgacgtggtgtccaccccaaacggcatacggaaaaagttcaacggcaaacagtggcgacggctgtgctcgaacgagtcctgctcgaaagaatctcaacggcgcggatactgctcgcggcatctcagccagaaaggtaacgccctgcgctcgtccgccggttccacggccaaccatttcgctagcagtcgatctagcagcaaaacgcaactggacgaggacacttctcgagattcggaaacgtcaccaaactaccgggtaaccggccggttcgatgagacggaaacggacgttgccaatatgttgggtaagtggaaataa

SEQ ID NO: 1188 - DNA, 975 bp, Aedes aegypti
tcctggtcaccgagtggaacatttggcgactcatagagacggatctcgagcgacaactgacaactaacacataaaacaggcgttcgagggtgatttagagattagtagatctagagttcttaggaataagagcaacgggaagtgagggataatcaagacggtatctcaaccggcaaaagcaatgtattccgaaacaatctcggaattggacacgatagccaatgtgatcggtctgcggggagtaggaacgagtacattaacaaagtttgtcgatatgtggtatcacgtcttcctgtgggctttgttttcgtcgattgttatccataccggtgcggcggtaattgcgtttgtcacgctacgcaagcacaaatttggtcgattcttctcaatttttatcctagtaatgggtgttgtttctccggttaccggaggcaccgtcagtagtgccaccattgcctttgtacatagagcctcgaatttaccaatgtcgccaatcctggcgatggtatacggcgttggacagactatactgtctgcttgtctcgggttcacgcggctactggcaacactgtaaatgctattggcatatcctgcatatggtctgctgccagagcagacaacatcccactcaaatacaaatacatccatacatgtaaattaaacacatctaaattattgtactagtggaaattctaaatagatcaaaaacgttagccattttacgatagtccagtttttatcaaaatgcgcaagagaagaaggaaaaaaacgaatgaaatgcatccttagggacaaccatacaagggccatacaacttgacacgacacaagataaggttgatacctattcgaataaaaaaaacgattgttttaaaacaatgataaaaacgtcagctaatgtgttgtaacgagcaaaaagagaagacgacaaagcgaagactaaaacagaaatgagccactagcagtaaacggatgc

SEQ ID NO: 1189 - DNA, 1470 bp, Aedes aegypti
attgacgcagttggtgttgttcgatagattaatttaaaagtttatcaaatttcttgaagaaaaataaggaattaatttctcaaaatgcctttaactgcggagcaggcaatgctccaagtgcaggagcgtctgcgttccctcaaatctttgatagtggaaatcgatgctgaacgcaaaaggaacgaacccaacatcgtcaacacgatccgattggccaagatgtccagcgacgagaaatctgcggcagtaaaccacaaattgaaagctctgtacaaaaccggtatccaggatgcgattcaagaggagaatttgatccgccaagctctggccaagattcaggatatccggaacatacggaacgaacgaagaatccaggcaaggaatgccgggaacaaggaaaccattcgacgaggagccctgatgaaaatgttgcaaatatcggcccaaactctgccgctgtttgtgagcaagcctggagagaagattcctcccttgtgtggaagcattccggccgacaatagttacgtggctaaaccgggggacatggtggccgctttggtgaaaggtttggaagacgaagagaattggattctggccgaggtggtccattatatttcttcggccaacaagtacgaagtggacgacatcgacgaggagcagaaggatcggcacatcttgagcaaacgccggattgttccgttgccgttgatgagagccaacccggaaacggacggtcaagcactgtttccgaaaggaacaaccgttatggcgctgtacccgcagaccacttgcttctacaaggcggtcatcaatcaactgccccagacggccaacgaggagtacgaagtgctgttcgaggatccgacctatgccgatggttattctccgcctctgtacgtggcccagcggtacgtcattgcgatcaaacagaacaagaaggtcggtgccagttcctgacagtctcagcagacagccaccactacttctgctgcaacgaattcttctggatccacggttgggtcatcgaccagttccgcactggcaggggcctccaccaataataatgccatctcaacggggggaaacttcccgttaacatccggtagttttatgcaatccaaggaagacaacttgatggacgtgttcatgatggatgatcagttttaatagcaaccagataatcagataatgcacataattttaaagcggtattgattacattgcatgccatgcacttacctctcaactatatatcctttacaaatcgactgccgattaaatacaactagatcaccgtttattacatcaaagcattttaacccccaagacacgattgtcttcataacgcgttatacacttatctcaatcacctcgaatgatgtggtcggaatcaggcgctgctacgaggtgatagaaataagggaaaatatagcgttaggtacctaatggtcaaataaactacataatcgt

SEQ ID NO: 1190 - DNA, 618 bp, Aedes aegypti
atgaaaatacgatcctacctacgatatatgataccagcattgccgctcgtgccttctgaagtcatctctggagcacagtattcttctgaaggtaaaaagcatagtatatgccttgccggagtgtcgtcaggtactgccgcccctgataaaatctttccaacacccacagcaaaatcggttttgctaacgacgtccaaatccatcatcaaccagtgccgccaaaagatgcaggaaacaacgttatcgacgactcttcagtatcgaatggttcaacggtctgttattggcaatcccaatatttataacggcaaacgggcgaacaattcatcctcggtgggaaccctactcggaagcgctcacgactcgaacgcggaggagcactcttgccagccagagctgagtcaaagtctgagtctcttttccgatgtgaatctgtgtgtgcaagagtatcgcaaaaaaggacggtctttttctcggtcggtcggtcgaacggtcaaatccggatttgctgccgtgaaaatccggcctggtcgtatcccgcaacggttacggtcatttcggggtcgggatctgtgttcaggagtgttgaatattgctaagcgctacggtagacggtga

SEQ ID NO: 1191 - DNA, 4615 bp, Aedes aegypti
gccgctaatgttgcactttgtttgctttttgaagagatatcgagaataatgacttttcaatatatgatgatttattgatttgagttaagctgcataccattgtctaatcgggagtgcattttacaataatcaaatggataaaagtttatctaatcatgtttggtttcctatcatcaattttgtttgtttgagcagctgctatcaaatcaagatttgaaatacatatgtagttcaatccaaaatcacggtggtccaaactataacttagatcattctgaggtgcgaggagtagaattagggttccgtctcgagttcgaagacgacacatccgaccaggagaagcagtttttcatgcgagcctttccgaatgtgaacaaaatcgcggaacgcaaggtgcattgcacgtcgtgctacatgcacatcggaacggccccaatcacggaagccataatccgtatgcatccggtgctgcgggtctcgcactgccgcaactgccacaccttctacaacagtggcgagttcgataagggcgaagatggcagcgaactgtactgccgctggtgcggacagggcggcgaagtgtactgctgctccaagtgtccatacgtgttctgcaagaaatgtatcgtgcagaacttgtcccgtgcctgcgtgcaggacatttcacgcaacgacaactggcagtgcttcagctgtgcaccgaaaatcatgtggcatttgcgggcccagcactgggcgttggtcaactacatcgagaagcagaagaaagacatgaaagacaagaacctctcggtgcaaactatcaataacttgatgaagcaagacaacaccacgtgttgcagtggtaaaggtcaaaacaagaagactactactccgattgcgcccaaaaaagccgccaaacggccatccgatgctactgatttctcaccgggtgctgccaaaataccggataacaagcgggccactcctcgtccgataatgccggtacatcaagctgcggccactccaccatctgcgaagaaagccaagactgataacaacgaagttgtatgcactccggacatcatgagcatgtttatgagtccggaggaacccccaccattggtggccgcaaggacgctaccaccggcaccaaagccgacgccaccaaaaccaactccacctcatccagttatgaatactacagtcccaggtcgccaagtggttgttcggccagccatacctgctaatcaggctcccgttacaatgcgaatgccaactatggccaaccccgcaaacaccgctccaccgccagtatatcataccatcaatggctacaggatcgaccttcacacggctgctcaacagggtacctatcggctgcccaacggcaaattgatccaggtccgtaaacaagctccatcagctcctccaacaccgaccgcgattcctgctgccagaaacattgctccgaaacccaacacatactacaacccagttagcgttgctcaggccgccccagttcgcatgaccaatggtggcaccaacatgcacatcaatatcgctcttcaacagcaacagcaactccaagagcaacgtttgcagcagcaacgccaacagcaacaacaacagcagcaacagcaacagatgattcaacagcaacgccaacaacagctgttgatgcagcaagctcaatcgggtcaaccgcaaccgactatcgttgctggacaaatcaatcctgcccttcagctgccaacgttggctttgctgcagaacatggtcaacggaccgcacgaagattcgccactcggcaagtctcgcaagaactttgaaggcaagttgctgtcgggtgtagaaatttgtcagcacattgtcaacaagatcaacactctgaccaactcgaactcgttcaagaacatccgcaacgtgcgggatctcaaagagttgtacattcacgtgtcctacctgctaacgtatgccatcgggcggttcaagactctgcaggagaagtgcgttgacgatgtgaagaagatgggcttcaccaaggagtcggactttgtcatgatgggcgaacagattagcaatcggaatccgggcgaggacaagagcgacgacgaggatgactgtgagatcatcgagcagagcacaacgctcattgagctggattccgaagatgaggacgacggtggcaagaagaagaaagacgaacaggccaacaagagcgcacagtgtccgatggaaacggaagctgctgtggcggctattttgcaggagaaggatgatgctaatacatcctccgaacccatctcggtagacagcgatgagcggatcgttccagcggaaaatgaatatccaaacaaagacgattcggcagcggcggcggatcaacccgaaccagagattgtgtcctcggaagataccagcggcgcaaaggaggttatttccgtggattcgaccgaaacgatcgccgaaaaggctaacgttgacagtaataagagcgacgatgatctggtcgaaattgtcgatggagatgacaaggttgaatcgcatggggaagcttcagctaaacccgatgaagctgcagccgcttcgagagacggtgaagatgcaaacaaagatgtggtggaaatcagcgaatccactgatgctgcgcaagcacaaaataaggaaaatgatactacagataaggagagtgaagccgctgttgcagtatctgaaggagatagagaagaagacaaacaagaaaccaccgatgctactgatcatggcgaatctgagcaagaaaaaacagaagacgttgcagaagcctctgcagacaaagaggaggatgttgcaatcgtttcagatcaagaaaagcaagaatctccggaagccgaggtttcagatgagaacaaatccaacgaagagcaagatacggagatggaatctgctgaggtcgagaagacgccggaggttgaatgcgttgaaaccagtaaagagggtgaaaacgagaacaaagaaaacgaactgcctaaggaagaagattcgaatacagcgcaaggcgatgaagcagtagtggaaaaggaagctgaggaaaacgatgtagtggtgatggaaaaggaaggcgatgaaaaggatgaaaacgatgctggtgagcaagcggaacattcagaggcaatggaggtagacgcacaacctgaacctgaagataaaattgagagcaattgcgtagcagacgcagagccgaaaccaagtgaatcagaagatacgccagcgtcaaccgaaatcgctgaggaaaatttgcagattgagtctactgctgaacaatccccagaagatgagtctattcctgaacaatcccctgacgaccagagtgaagtcgaggcccctgaagtcgctacccatgaaccggaacctgcaatcgctgagagtcatgttgaagcatcaaatgatgatcctctagctgagcagcccgactccgaatcccaaacaccacaaattgttgcagtagaatccttagtagattttgaggctgagcaacccactgtcgagacgcctcccgctgaagaaacattagtggaagaatcctcttgcaataaaccttctgccatcgaggctccagtggaaccaacttcggatgcggccacagatgccgttgagactcccgttgaagaaatgcttgatgccccaacgggcaatgaacttcttgcacagatcgaagactccttcctgaaactccaggaaatgattgaatccactgaagaagcgaccgaagaagcgtctgcgaatcaacctacggcggtggatcaaatgacggaagcagcggttgaagcaccatctgcccaagagactgagaatgagcagatggaagtggatgaagaagaatcttcagaaccagcagcaacttcggctatggctacgcctgaagaagagtcgctgggagcaacttccgaaggagccggtagctcagcggcagaagacaaagtggagcaacaacttttggcggattgcaacggagtgctagaggaaaatggcacaagtaatttcaacgggatcgatggcgagctggaggagatggcagatgtgcttggtgatgagatgctggagatcagcaaaatggcgacagcagccgaggtcgagaatattaactctccagagatgattagtggtgattattaggtgacataaaccaagttgtacaaaatccttttgcgcgtagatgataaataagtaacgagacgtaatgactgtctcttagttttatataaatttggactagctcagtaagtagtgtaacactactttacaatgatatctttaataccttataaacgaacatttaacaaaaattcaacaactattgaaatcaaattatcggtttagatcgtaaggcataatcgcttttttaatttaacgttatttgcctttagggtacatttttgaatatctgtccgtagctatcagtatctaagcatactttgctttagagcattttttatttgatcagctagaattatagtaatgattatggtattcgatcaacttagagcacattatagtaatttatgtctgaaggactcacattgaaatgaactatgtagtcactaaggtaaacctacacagcagaataaagtacattaaacgtcgtatgaatgtc

SEQ ID NO: 1192 - DNA, 2248 bp, Aedes aegypti
caaactcactgccaacgtttgtacacgaacgatgattgtcgcgacgataacgcctatcagtgctgattggtaatgggtttcgataagtgagagcaaggttgcaaaagtgtagcaaaaattttcccacatgattcctatcacagcgaaaatctaatcaaaaatcatttctcccgttcgttttgtttcagcttcctgaaaaatgcctccaccgccaccgccgccggggccacctccgccaccgggtccaccgcccccgccggcgatgaaacttggtggcggacaatcctcgggcgatggacggaacgcgctgctgcagtcgatccagaagggaaccaagctgaaaaagacggtcacggtggacaagagtggacccctgattcagggcaaggtcagcggaggaggtgttggagcgggagccaatagcaatagtattagtaggggaccagcgtccgcggcgtcgggcacaagtgatagcaatggaggtcaaaagttaggaggaatattcgaaggtcttgcgtcgatgccgaagctgaaaccggttggcagccgaggaacgacaacagcacaatcatcaactatcagcaataagtcaccatcgccggagaatacgatcaagggcaacaaccggataggtggcggaggcggaggaggagggggtaacggtggggccgtggactttgctgacgaactggcggccaaactgacgctcaagaagcaaaagaaccttagcaatagtagtaccaacaacaacaatgccatcgtgccggtgacggagagcaatctacggacgaaccgaggacccccaccgcaacccccgtcgagctattccagtcaaaagagtattctcatcacacaaaaaccatttctcttccccctttctctgtatctctatttatgtacacttcctcttcgggttgttcattcatcactactcatccaccaaacttcatcttcaaccgattcggatactgtactgtgtgtgcgtgtgaacctccgatcggttcggattccgggggtaagtagccaggcaccctcgacgccaagcccgtcgccctcgaatgggcccacctcagcagcagtcactagtcccctcggaagcctcagtgtgctaccgaacaaatcgaccctgtttggcggcagtggtagcagtaatagcaacagcaacagtttgaccggaagtccccaaccgccagcagtgcctcagacgcaaccgagccccaagccggtgccgaaccatggaaaaccaaatctggccccgaaaccgccgggcatgcagctcaatacgagcgtggccagcaacaacaatggcagcggtcgcgtcgcccgacatcacagtatgaggagtcccaggtcaccgcctgtggcaccgagtggtcccaactttggagtgaatcatttcggaacgctacgaggtcccccatcgagctttacatcatcggagtcgttagctaggccaaacaatccaataggacgacctgcggcgccgcctccgaagccaccagccatgaaaccaccacccccgcctcccatacgcagcgtttccaacaccaacctgtcgcatttacccatgagtttggcaccggaaacgacggaaccgaacttcggttccgccaacaacgtggccagtgccgtcgcggacgagctcaagtcgaagctagtcaacagcggttcggcaaacaatgtcgcaacgctcaccaacaccacatcttccaattcgatcgtatcgaacagccagcttagcatcggcagcacgaaaaccctcagcagtggcagtattaaatcgacggcacccccacttcctccccatcggacgtcacctaacatgacgaacatttgccattttggttctctttcgcctccagcagcaactcaacaccagcatattggtgaagcaccgccgcagcctcctcagcgaatttcctccatccggcagcagcaactatcggcactacaacagcagcagccacagtctctctccagcgccaacaccagccctagcagtatcattagcgatagtcagcaaagctcaaatctgaaacgaaaggagaccatagctgctgctgccccggaacgacgaaagatgcccccgccgctgagggagatcgacctggaggccaactactcgttctacttccgcaaggtgaccgagtttcccgcaccgcaaccctttctcaatgtggccaaagtctacccgagcatgatacggcaacagcagcagcaacagcagcaccaacagcaacaccactaa

SEQ ID NO: 1193 - DNA, 3226 bp, Aedes aegypti
aggcggtcgatttccgaaccgctgacactgcgaagtcttccgttccgtcgctctgccatcagtctagtgagtcgattactggagtaagcatctggcgcgacgttgttttatcggcatagtcgttgttttccccgtaccaaagaaaaaaggtgtcaaaaaatagtgaaattgattgctgttttgatttcacttcagtgtgcacagacctgtgcaggcgtgtcaaaacgttgtcgtttagtgtcgcactccgcaggttgcttcgattgatcgaattagcatcttccgtcgtgcgaaaagtgtgaaaattagcatttggagtgaactgctccgggttttttgctcacggaacgaatgaatggacggatgcatggcgtgttgacttgaactgatacctacctacctggccacataatttcgattctacatgcgtagtcggtatcggtccggtccggtcgacgtcgggtgtgccgtcaggattttcgtaaaccagcggtttttagtggtctggtttgatgatgtataagtgaacaacgagaggaaagaagcggatgactattattgcatcgtcttcgtaaagcactgtgtgctgcgctgagctgaaacgaaccacccgcagcatcccctattgtcgccgtcggcgtcgtttgccgttttcatcgcaatcatcactacatcatcaatatggatcgagcagtggaaacatcaggagtgcgtttcaagtttctatcggtggtgttttagaaaatagtgcttccctataacgaatggatctatggtgctggcaaaaataaaataaaaatagttgatccaatcagttcatattcgcgaataagaaagtgattgtgaaatcttcgatactgcatcctgtttcgagcaacgaatagaaagtgaaaaattcgcaactcatcacgctgtaaatacaacacatgcctatttgcccctggtgaaacattagagtgaaagcaagaaaaagaggatattgcgctcttgctggtgcatggggttacaggaaaaaaaaagaccaaagtaacagtgcaggagaatccggaaaattgatgtgcgaaatcctaagccgcctccgctagagtcgccgagtgcgcccttctcgtagaaagcagcatggatgaaccgatccacgacccagatgatggaacagcctcagcgaacgacagtgaacaatttctcagagcatcgtcgccaacttttctactgccggtcaccaccgccaactctgccggcagaaacagccccccttcagcaggatcgctggggtctatcgcgccaacgaaagcgaaagcgcactccatctgtgacctagatttgcactcgccggtgatcggcccctatcaccaccatctgctggtaaaacaccaccaccaacaccattaccaccacctgcagcttagcggctctgtcaaaaacggcagcattagtaaatctcccaccgtcaccaaagccagtatcgaaatgcgggacaactactgcttctaccggttgcagcggttcgtatcgcgcaatccagtgctcaactacctgctgccgctgtgtgcgatagcggtgctagtgtttgtgatctatgccttccgggactatgccaaaaccatgctttactggatcgagacgcaaaactcgtggatcatcttctgcatcttcctgtgtttgttcacgatcgtcagctttccggtaacggttggctacctggtgctgatcatcaccagcggctatctgttcggcttcatcaagggcctgctgacggtggtcatcggcgctaacctgggggtggccatcgcgcacaacaccatcaaggggatgcagtcgaagctgccgttgcataagttgataaaaaatgagactggccgtgccatcctgcgggtgatatcaggaccacgagcatttaaaatagtattattcgcgagactgacacccattccgttcggactgcagaacaccatcttcgggatcagcgctgtgaattctcgcagttaccacaccggtacggtgataggtctgctaccggcacaaacaatcaacgtctatctgggatccaagctgcgctcgatccacgaagtgctgaatgatcacaacgctgcccttggactcgctggctacggagtgtttgttgtagaggttgtggttggtgcagctttaatggtatgggtcatacagaaggcccggacggaactatcagcggctttgctgtccgatatggactcagacgagaagatcctgatcgaagtggaagcgtaggatcgaaaagattttcgtcaaagtcgaaagtctggctacatcagcattcgttgtgagaataataggtatttattcgttaaccatttgtatagaaagtagattaagtatagggaacgaaaaaaaaaaaaacaaagaacgaatcaagtcgtatattttaagaatgttttgatggttagatgtatccaaaaacttgagagaactattttaggaaagaaaacggtttaaagatggtgttttgttcctatgaaacaaacaagctgagagaatggtaaatcagcagtagaatcttttaattaatatcaatcaattgatccactgtctattgttatgttataacctgaaaaccgtccataaatcaagaattactccgaatctactacagtcaaaccagaatgaatcgaaaaaaaggtaatctttgcgtagggtcatgcagaaaaacagtcttcagtcccggcagctaacacatgaggtcatataactttaacttaactgatttcttccagcaggaacgttcacttaaggcgtgttgaaggtgtgccctggcgttatcgaaaccacacaaagtgaaataattgcgagtaattgcgataagttgtgtacttatggtattgcatatacttgttcaatgcattatgtatggttttgaagactctcggtctatacataagggagcgtcgttacatcatgtcaagaacgttgcttaaatacatcaaaagttgacacgcttcacgctatgtctgaaccagacgattatgaatatcgaatgtacatcaggttttttcacgctagagagcagcatttggactatatttttatattcggaaagttttagaatattctatcggtgaatttttttccatacattttgtttgtgctgaaatacgttgataaatgggattttcatgagttgtagtatgaaaaatagctaaaaagtagaaaaaatcaaaatttcactgatagaatatttttaaacattccg

SEQ ID NO: 1194 - DNA, 2752 bp, Aedes aegypti
cagctggacgcgattcggcggcagttggaccacctgctggaatgcctaccaggaccgagaactccggagcagttgatcagattcgacgacgatcagcgtacgctggattgggaaaagtacgcttcagaacaatacccggattttctggaagagttgatcgcgagatttgatcgggagttccccggcaaggagccgcacgtggatgcgaggattatgaggatctttggcattgactacaatcacgtattcgtagtggagagtttggcaatgctaactgcagcagataaactcagccaaaacagagaagtattaccatttatattgagtagattagtacaggatggcgagtatttaggcgggtgctttgttgaattgagcttgaagcaaaccgaatctaccgtcacaccatcgaagcaccatcattggcacaaatccgagcaactggttcaaattttggccagcattccaaacaaggtggccaatgtactacaacgggatacaccagatacgttcctaccagaacggtattctcaaattatgctccaacaaatgctcagagcaattaattcactagccaaaatcacccatctacacacccacctcgcttacgacacgacattccttgcaaagctattcagcaaactgattgtagattacaactttgataagcaatcgcgttatttacaattctcgcttcgaatcctaacacattgggcgcggttcaatgattgccaacagagaccacttatcgcagcgatttgcaccggcttatcgcgtcctgcagtggaagtactcgctcaaattgctttacgcgaaggaattgatttgtgcaatcttttcggaagcaacgattgcactggggattggaactatgtcctcacgaagaagattccactgttttgcagcttctcacaggatgcaattgttgagaatctgatatatttattggcgaggatgttcgaagcggaattgaaggcattatccttagaattagtgacggtatggtccagtcgcacaggcatccagaagacatcattcgaacagcatctgtatctgtccaagttattggttttgtctacgacttatctaaatcaatcgaaaaatgggaaactgaccgcggtggagatgcgagagtttcgacgcttgctatttggaggactaaagtgccatttggaatcacctgttaaggaaatgagatgcgtcggaatgatcgtgtcggaggtcattttgggatatttcgatgcttccgatgtggaagaagctaataaactaaaatttgattacgatggatttgataaagatacactgaagctagttgactgcttgcgcaatttcaaaaaccgatgcagatttgttgaggatgagctatcgcaaaacctaatcagctcagaagaagcaccgattgatcaactaattgaaaaactgtttgaatctggaagttcagaagctcagctgccgtcatatgaaaatttgcaatcacaaacggtagagcccgtttcatcagacttcaaaatatccgccaagcacggcagtgacgattctgaactcgattcggatgatgatttggaaccgtacgacatgtctaatgatactaatttggaacaagaacaacatcgtccaaagtatctcctagatcttcgtgaaatacttctagacacttctgatcagcatccaccggcacgtttcgaacttgccatccaagctgcaccagagttgatccagcagcagctacccaacaacgacatcaagctagctctcgatctactgcaaataatcctcccacttgaagctcgcgtctatatggaaaacttccaagagtacaaattctccgccttgactgctatatgcagcacttatcccaaagagtgcgccgagtatctctgttgcgagttccactctgagcttagtaaatactctcttaatcgtcgtattctcatgttggacatccttgcccaaaccgccaaagtcctcagcaatctagattccacaaatcgtcaatctaaaactaccaccagcgaacaaccggaactcgcacctacgccaaaaaatgccctggatctgaaattccgcgaagagaatgaattgcttcgcaaacgccaacttgcggaacggatcgttcgcgaacggattgctgggaaaacgcgccatatcacgtctcagcgatctactgcctcctcgtccgtgggcagcaaacttccgaccgcgaatcgtttctccgacgtggcaggatggttctttttcccgctgctacgaggcttcggatccaagcagtttctttttactgcaaacctaaaatttcagtacgatgccgataatctcctgttgaccacattccttcagacgctttcgattctcatgatatgtgctgaaaactgtccgatcggaaggaaattcgcccgagaactgttgaacctgagcgtgatgctgaggtttagtgaggaaccgaaagtgcgcctgtcggtgctgcaagtgctatcgtcgatttttctggcgcttcctaaggcaattctgcggcaggatttctacatggacatagttgagctgaagcagtggctcgaggagtgcgtacaagctagcgtcgtcaagggagaaccaaatgaggagtgccgggaatttgctcggaatgtgcttgttatgtgctatggcgcgttggcagaagattaaaaggggtacaaatagagttatttctttagtggttaacactaatgtgaacactttcgaaaaatatagatgttaaggttaatgaacttgc

SEQ ID NO: 1195 - DNA, 225 bp, Aedes aegypti
gcgatcgtgttttgttgttattatcaatcgggtttattaatccgtatccaagcgatcaacgagatcgcgatcgagtatctagagagggtgagagagatagtgaacgcggtgtgcccagttgagtgggcaaacggcgatcagacacacacccctgcggtcggtgttggtgtgctggttttagcgatcacgactcacagccctgcggcacttgaagcggcaacaaca

SEQ ID NO: 1196 - DNA, 693 bp, Aedes aegypti
atgaaggtgcagtacgacttggaaggcggtgtcctgaagcaaagtatgggcccgaagtccgtttcgaagcaaattctctacggagtattgctgctagtgatcgtggcaggatgggtggtctatcaacaaggtggagtcttacgttctaaggaattgtcatgccaaactatatctggagtaactgttactaccgaagatctcacaaatacagttgttcagagtaccgaaaatcctggcgttacggaacagttccacgtagagagtgtagataatctgattggagccctgttcagtccatttgttgaatcggaatcggccgttgtggaaatgaagctggacaccgatgggttcctgattaagttcggtgagaatgtggataatttggtggagctggccagagattccgaaatcaatacgatgatggcgatggcattgcaggaactgctgcttttgggtcaagaggataagccggggaagaaggttgacatcggattgatgaaaaaggagaattcgtacgaggcgacaacagtgaagaaagtcgaagagctttggacctggtccactggtaatctgttggagtttaagttccgctttgaagataatcattgggagcttgaaggagcagcagaatataaatctagtgaggagaagaattcaaatgaaagatcggaagaatcgacagatgatcgatag

SEQ ID NO: 1197 - DNA, 924 bp, Aedes aegypti
gatcggaaaaactctcgtatgccaacggtaacacccatccagggtccaatttttctcaagaatggaacagttcctgtcgtgccattatttgcatatcctcaagtcagcaatggaacgttcgtccagataccgatctggtggacggccctatcagtagcgcttggtctcaacgtgcggggggatgtgatcaaaggtgttccttgtgttaagaagaaccatcagctgttctgcccgacggctggcaatagttatccaatagacaaaatcgaaacattcatcgacgagaacaaggcgctaatgaaacgaatgtacggagactttgagatgtcctcgaggtatccgccgttgcaaacgaacaggaaacggaaacgtcaggtccaagggatggacgatgatttcacgatactgccggagctgatggatctttacggagtaccgggctcggcggatgatcctgtttcatttggcggcagtggcgattcctactttggacggttacgggacaaaaggcaaagttcaactggtcgcagtaacaacggtggagcaaatggctcaaatggtagcagtaatggcaacggcaatggaaatgcaaacagaaggcaaggttcgacgcccgatagcagtggtgagagtaccggaagggtggacgcatgcgaatccaagatcgagatcgtcacaccgtactgggcatccaactctgctggaaaagtacgtgccattgtaaatacgcagcattttgagcaagcaattcaccaggaggtgtgttcaaaaacacagacatctcgctgctcgggagattgcggttgcgagcaaaagtacaaatggcaccggttactggcctacgatccggacaacgattgcaaaggtatcttcatggattggttcctgtttccttcgtgctgcgtctgtcggtgcagtccttga

SEQ ID NO: 1198 - DNA, 1268 bp, Aedes aegypti
acttccggacaaaatcacccgatcgtcataagtcttttctaggttgtaatgaagctcatcatcatactgatctacgtctacaatttggcccaaagttcgtggggacggtcgtttcttctgttggtggttgacttttcaatcgttccattccgcaaagaagtgagtatatcgttcagatctactgcaaacagtacagacagtaagcggaaaacatgccgggagatgagccacctttgcggtcagttggtgcatcaagcataaaagcgcagtctgttaagagacagcaatagccgatgtggtttagctcttcagtattgttattttttcgtttcttaatttacaattaagtgcgtgccatctgcgttccagtgtttgtgtgtgccatctctaaagctaagcgattaaaattgcagtttgcgtgtttcaaatttagttttgcgttatttctaaaagtgtctgactacttggtttgtagagtataattaatattttactagcattaggttcttcatctttttgcacatgtagtcttatcgtctagttcctatcggtttcgtttagtcctttctctatttagaaaattattgattatgcttttcctgataatgctcaaagtgtgtacaattaatacgaaaaaaaatctaatacatttctttcggtgtgggaaaaatgttttacaatcaatttagtgtcgataatacaaaagagcgatccagtttgagtgtaaaatttaggctgccaaatccgaaacttacgtttataaatgtctttaaaagagaaataataggtatcacatcatatttcacgctgctccggtttgtgacaatggttgtcaattgcaattgttgatgttgacattttttttttggaaaattgcacgaaatgggaagaagggcaaacttagtattttcacaatcggttctaacttaacattacaactggacagattatctgtttagctaaaatataagtgtaaatatcactacaactgattgaaagatagattatagaaaacaaaacactaataataattgcaatttctctttttttaaatcaggaatataaggcggggtttaatgcccctggacttgctcctatcatctttagaagggttaagtatttttttctgtgtcgatttttcataaaatagaaacataacaaagaaatgtctcaccacaaacgcatcctctcatcacattctctccctcacatcctatctcttccgctcggcgtcttacaacacgcacccatacatacgcccattcagt

SEQ ID NO: 1199 - DNA, 528 bp, Aedes aegypti
agaaaacttaacaccaactcaagcacttcttcgcttataccagtaaattccacctccaatggctgccacaatcactatgaccgcagcaccaattatgaccaggtgagaacttccatttccaccttcgttgctaccattggtgttgtcctgggccttgtgcccatcttcgtgatcagttttaccgggttcctccggcggcggctgtggcggtggcggcgaaggcgtcgtttgaggagaaggaactggttcaggacgaggtctaggaggcatcggcccggtacagcacattccttcaacctcccgctcattctgttcgcagttgctgtgccgatcagtcggcgtggcaatattgtgttcttggaggaaatcaagcatgtcctttatatttcggcactggaaactgtttccgttcaggtacacggctttcagcgatttcatgtccagcagatgggcgtagtcgatgctgtccatattattgtcattcagtttgagagtttccaaagccgtgaaaggatagaagatttctag

SEQ ID NO: 1200 - DNA, 714 bp, Aedes aegypti
atggcgtcgcgaaatttcttcggagcgaaagcacaagcttctattctgccgctacgggcgatttttcacactacgattcgccaactggcgtcacaacttggcggcaagcatgccgacgaaacttccccaatatgcgctgcggcagcttcgtcaaggatccttcggcatacgaacagcaaacgcagcagcagtagtagtcccaacgattatagcgattcggcgacggggtcgttagtcaaggaacagcaccatcgccaccaacaacagcagcagattaatggaaaatatttaaactcgaatgagaacggtggctccgaggacagtgccgggattgaaactccggccggagcgacactattctcgtcatcggcatcatcatcattgtcatcctcgctgtcatcgccgctgtcgcataattcgccgcaaacattgacgctgacggcggataaaaataaaacaagtaagtgtttgttccgcgcggcgggcgacgccaagatcgttcccgtcgtatacatccatcatgaaaatagctcgcttgatatccacagcacgagcatggtgaagatacatgccctccttcagtgcgttcaacctgttctactgccccttttgaaccaaatcccatataacgaagctcccacatacattcacagcctagtaatacgtatacgctctgaagcatacatgtgtggaaccaacctgttctacgaataa

SEQ ID NO: 1201 - DNA, 8286 bp, Aedes aegypti
atgctatccgtccgattaaatctctcggattgcggttcgaaggtgcaactactactggctgccttcgttacgcaacggaataggactggacgcggtcgtaagtcgctgaacctaggtgccacaccgaagaacctaccgcagaacgcatcggcagctagcccggcgccagcttcgttgccacatccctcaccgaacaccaccaccggtgccgttgccgctgcaaccgggacttccaatgtggtccaatcgagccaactggtgaccgtttccggtgcccaaacaggtgtcaacgccacgctgctcgccagcaacaacgctagccaaccacttcagcagcagcagcagcaacagcttgcacagcaaagccaattgcaacaacagcagcaaacaccacagcaacaacaacaacaagtgccaacagtcggtataatcaaagccgaaacaatgaaggatcaaccacaacaaccaatggcaccaatggcgttctacccaacctggcaagccgacccgtcgcagggctggcagaatcaattcatccagcagattccgcagaacacccccgccatcacgccgctcaactctctcgaattccagccacagggctatgcagcataccaaccgaacagctatgttcaaacggccggaatcgggttcgacccgaactacggtcgcacctatgccgcaccgccaaccgttcagcgatacgaattccaaaccaaccaaatcacaccgatcaaccaggtatcgctgcaaagcgtttcctttgcaccgaccgtcacctatgccggtcaggtctcaaccggtccagccgtcgtatcccacaatccgcacgatcagttcaatctccagctgaacaagcagacgtcgggaaacgacatgcctggatatccacgggtgaacagcgtaccgccgcgctcactcaattgtaatggatattcaggccaagactatggcggccaaaccaccacccaagccagctcggcaacgactaacgtaaccaacgccaacggaacgtccaccagcaccggagccaacagtggcaccggcagcagcagttccatgcacccaccggcacaggtccctcagtcgccgaaccgacaaacacaacagcaacccccacgtcccaactccaaccaacagctgtacgcccagcagtctcccaatccgtacagcagcaatggcaacaatagcaatctgcagcaatcgccgaaccacaacaatggtgctaacaccgcaaacaacaacaacgtctatgcacagcaaacgcatagcggcatgcataccccttcacccatgcaaacaccagacaatcatcagtcacccagtcacatgaatggtggtcaacaacagtcccaaggcgactgggtgggctggaatcaacaacaacagcagcaatcacccgatatgttcaaccaatcggatcgagtaaacctcaactcacggttgaaaacgatgatcatgaacaaaaacgatcccaaggacggggtcggaggcctacaaccgacaggtcaacacatgagtcatctaggtgtccaagcacagggaccggcccaacaacagaccggtcattttttatcgtatagccaccatctccgagacagtctaacgcctacatcgctagcggctggtggtagtaaccctgcttccggtcagtcgccagcgcccatgatgggtggcggaacaggcagtggcagtaacagtacatccaatgatggtactatcggagatggtggcggtctgatcaacagtataagcaatattgttgatcccaactggaagcaaagcagcaaatcgcctggtctaggcggcatagagagcaatggagcaaacagagcagagcacgaacatcacacgcttttgagcgaccttcatcacggtagtaagcatcagggttttgagcagaagcagcaattaatcgacaagaataataccgacccaggaggtggtggcctacatcatgatactggcggcggacacgacatcaagcataagcttcattcctccaaatcatcgtcttcatcatcgtcctcctccaaatctaagagcagtagccataagaatagcgataagcatagcaaatcgaaaaacaatcatcatctcgacatgaatcaaccgatagactctaacaaatcttccagtaatcttaatagctattcaagcagtagttttatgaacgatcaacactcatcgtcatcgtcgtcaccgtcgccgtatccgaatcttaatcaaacatatccagcaatcaatcatagcagtagtagtagtaaccaatcgtcgcttggtctcggtggctatcccagccatcccctggacaacaagctagacgataaaactcctctgaaccggtccgccacgacaacctcaacagcggattcaatccacaccttccacatcagcagtctccgcacggcatccacagcggtgctttccaccatccgcaaaccgccaccagcggaagaaccgggtcttttggatgacggccagccaatcaagtccgacggttacgaaaagaactaccaaaacttcatccgctacggagaatacaacgacagcagtcaaccaccacaaagccaacttccccagcacggcagctctagtctctccggaacgacgaaatctgaatacaacagctactactctccttacggtacctacccaggctaccaaaactatcccaactatcacaatcaaaatttcaacagtccttcgggtagcagtgcgcttccaccaacaccagaagtaacaacaccactacccgccatcaccacacccgttgcccatcaaaccaactttgagcaacagatccccgcccatacatatccgattcccaaaaacagcggcattccgcaaccggacgttcctatcaaactagaagcggaagacaactcgtatctcaccaacactagtgtaccaccgatgagtgaatctagcccggtcaacaatcttcctgcggccatacccaacagcgctccaagcacccaagcagcacccgaaccggaagctccccctccgacccaaccaacccccacacctaccacggggaagtccaaaaagtccgaaaagaaagagaaggccaacaaagattcgccttccggtgacagtgaaaccaaacctgaaggcggtagtagcaaatctagcaaaaagaaagaatccaaaggctcgaagaaggaacaggaagcagccgccattaaacaggcggaagatgaaaaactggaaaaggcgcacaaaccggaagcaccggactgcgattgtttcacctcttcggacacaaaggctccgtccgaaccgggaagctactacacccatctaggtgctgcatcatccttagaagaacttcgccgtgaaacagaaacccgtgtgggtctatccggcaaacaactacggatagagaaagttgtgtacaccggcaaggaaggcaagtccagccagggttgcccgattgccaaatgggtcatccgacgagtcgatccggaagagaagcttctcttcattgtaaaacggagacaagggcatcggtgtaaggcggccttcattgtgatatgtatcgtagtctgggatggtattccaacgcaggaagccgacagcgtctaccggatgttgtcggtcaaactgaacaaatacggtcttccaacggtgcgtcgctgtgcgaccaacgagaaccgaacttgcgcctgtcagggtcttgacccggaaacctgtggagtgtcgtacagcttcggctgcagctggtccatgtactacaacggttgtaaatacgctcgctccaaaacggtacgcaagttccgtctgtcagtgaagaacgaagaagcagaaatcgaagaacggatgaacatcttggcaacaatgctgagtccgctgtacgttacggttgcacctcaagctttccaaaatcaggtccagtacgaaagggaagctcccgattgtcgactgggactgaaacccggaaagcctttctcaggtgttacctgctgtttggacttctgtgctcatacgcatcgagatctacacaacatgcaggatggatgcacggtgcaggttactctactaaaaccgcttccaccaggtgtcaaagccgacgatgaacagctacatattcttcccctgtacaccatggacactacggacgagttcgacagcgaagaaggtcaaaagaaaaaggccgaaaccggagccgtacaagtcctggagaaatttgcaactgaagttcgggtgcgatcaactcctctgcagccatgtcgacgtcatggaaagaaacgaggtaacggcaaggacgagaaatcaaaggatgattcaaacaatgaggaatcggttccggaaactcctcctcccccaccacctccgacgaaaaaggagagtaaatctaagagcaagaaaggttcctccaattcgtcaaacaacagcaacagtggcaatggaagcaacagtagtcaaagctcttcaggatctggctcaccgaaaggccaaagttcgaacagcaatagctcgaaagccagtggtgaaactagcgctaatggtaacaacagtgcgacgaatgcaactaaagcaactaccccacaaggaccggctacaggaaacaatgggtcgaacagtgcatttactccaccaaatgcaattacctcgccaaacaatggaggcaacagcacactcgtagatatggcttccatgattgacaacttcactgatgcccaattgcagtccaaccagatctcgagcacggtgctggattcaccgtatagttacgactacaacaccggtcaatacatcgataaccgacagtactacaacaactggccaacggattactacggcaatcgaaccgatcctaacaaaatgttgggacgaaatgaagaaattcccgatacaaccacaagacccggtagcaacagcagtaattctgctttcagtcctagcataccggatccgacgaaaacgccaaccccaatccatctagatgactacagtactaccaaattgaaccaacaacagagccaaaatacgtaccacacgctccaacagccggagcaaggttttgtcaaacctaaaccaccagactacaacccaggctatggttaccacccaaacactcctatgggctatggttaccattcaccgtacacgccatacgatccataccagaactacaactacggctatccgccccaaagctaccaccctacatatcacaacatgtactcggccacgcagactcaactgccaggaactggtccggcacctccgcctccacctactgcggtcataccggcacctcctccgccatcaaactggaatctctatccaccacatccacaccatcagacacacatcccgcccagcactccttcgcagttgcacacgccgcatcagccccatctgaatcccaagcagcacgacattcctccagcgatgcagcaagccccgcaaccgccggcacctccaccaccgcccaaggaaactctcggcgaagtaacggaaaccaacgagaacgtggactgcttcgaggacccgcagatgggcggagtggccatcgcgctgccgcacggcagcgtcgtcatcgaatgcgccaagctggagatgcactcgacgacggccctgaagaagccgaatcgcttgaacccgacccggatgacgttgatcttctaccagcatcggaatctgaaccggccgaagcacggcattgccgagtgggcggagaagatgcgcctgaagaagctgggcctggccacgaacgatcccatcgacgacaaggacatgctgctgatgcaggaggacgacataaagtcggaaccgctggacgacctgcaccacatgcggcacatgggcgatgaacacgacatgatggacgtcgaatactcgggtgtctagtggtgagagaaaaatctgccaccagggcgaccgctggatgagcagattacagcaacacgcggcaatagcaacaacctatcggcgtccggtttggcgacgtcagtgccattgacatcgcagccgcccctgccggcgggtggagttcccggttccagtcgaggaacggcattccaccatcagcagtcgcagctgccacatcagtggctccctacaacgggactccaaagccaaccacacgaaagacatcatgatcctaaccagtactactactattactattactgaagactactacagatactacagatgcggaggagaatatatcaagcgatgctagtgactacataagatttagaacttggaacacacactcaatgaggaacactaataatacgtacgctccagtatttttgagaagcaaaacgagaaacggtaagacgtaaatgaaaatggctaagattttgcattttgtaattaactttgtattcacgtcaattgttttgaccgtgaaaagcatttgagttacgtttggcaacactctcaactgctcaaaccaattctttgatgatttctgtttgtgtgtcaaaaaccaaatcttctgatcaaaatccgtatttatttgacttattcaagaatgaaacaataatgacaacaacaaacgcaccttcaggcacacactaaaaaacaacatagaaaaagatatcaaaactaacttttgaacaaaaaatcaaatattttgaaaacaagaaatagcaaatttaaaataaaaaataataatctatatcgaagccaaaagtacaaaacaaacaagttgttaacacaaaagaatctgactgttccactttaactattgatttagaatccaaaacaaagtttctcgtcgagaaaaaaatgtctggaccatttatctcctgcattaatctcctcgattttttgctgcttattttaacctaaaaccaagaacttgatgaacgaaacaaacgcgaaaactgctctcgctctagacagtttacgtgggaagaacaaagttctcccattactaccactgctactatgctctttagctccaatttgcttatagaatcggaaaagatatcacaaatgtttgccaataattcattgctaacgacaaactagctgttatagactttttcttttgtatataccattttcttaattgcaaaccctacaactaggtcaacagaattccttttttaacttcaaagttttccgtttctctatcaatcgttttcactacactttttcttaggttagaataatttctttccagtctcctaatttcacatggtagaataaatgaaagcgccagcgcacgcagcatgcgatatgcacatatactacaatacaaacacattcaaagcgaaaacaaaaatttcaaagatgaaaaagtattagtattttaacttagtatctaggtcttgtttttgattttccctgtatttttttaaatagctcactaagtaggtttttctctctgtaaaatctctttaccattagaatcgttttttaatattgaatattattcttctaactgatgaagtgaaacatgtaaaagacagtgaaaggacaaccgtaactcgaatcagttttatcaaataaaagaactgaacaaaaatgtaacccatcatttatgttaagaagtgtacaagtgaatgtttttagtttccctaagatccagcgacgaaaagaatcattatttaattatctatttaactatttattacaaaatgaatcacacactcacacacgcgcattgcatccatacaaaagtgacgtgaatctaaacaattagaacaacaagaaacacaaacacacacacttaagcgtgtaagtaattctattattgtcattaaattatccattagttttaagtatcatttgtctcatgagaaaacacatcatcttgtgtaattttagttctagtaaacaaatgaagaaagtaacaaatcgcacgctggaaggaaaatcgctactttagtgcgcatattgtttagccataaaacatataaagaattacaacacagtgattggacacagtgttggcgagtcagttttgatttaatacttctttctgtactacaaacactcacagacaaacagacgtgttggttttcaactgctccgtagaacaagaccataattacaagtagatgtaaaataaaatcgtagggatgttatatagaagtaattaagacatgaaagaaaacactgatgatgatgataatgaggattaaaggtgcgtcgcaaacgcgtgtgtagaaagaaaagaaaacaagacaaatttgccatattctgaagaaaaaaaaaaacattagaacgtcaaccgtgcgtaaaaggtaatgaatactcatatacgtgaacattatttttcaagtaataccaataaattgcagtttttaattc

SEQ ID NO: 1202 - DNA, 330 bp, Aedes aegypti
atgcattttaggactatttttcagattcaattttactgtaatgaggcccgctggcgtgagaaccggaccatcttcaacaccccgaacccccggctgatgaacgtgtcgctcctgcgggacaacaagctgctgcacggccaggaacggcgcggttcccgcatgtccgtaaggctgccctcgcgccaaccgagcatggcttcgctccgtccgcattcgccgaatgcgtcgataggtaagctaggtctgtatgcggggaaccgatttccattccatttctactacactactatgttgatgttgaatacaccttctacgtacagctcctactag

SEQ ID NO: 1203 - DNA, 654 bp, Aedes aegypti
catctgcacagatcacttcactataaagaatcagcagaggcatttggaaacgtattaaaattgaaaagcttacctctcgaagatacggggggcttcttaccatgcgcgccgcttgttgaagcttccactgttgttggttttgcgcggaggcgactgtcggaaccctgccgggataatcgtggtcgccagctgattgatctcgtcaaagtttacaccacggtgatcgtccttgaaggaaccccttccccgaggatctcgcgagcttccgccaccctgtctcatagaggccatctcacgggccttcgggttcatgggattcggtccggcgtagcgattggcgtttcgctcgctctgctccagaatttccgaaacgtagtgcaagcccgcgttcagatgctgattacgcatttccgggacatctcgttccaggttgtgcatcaaatttgtcatattaccggatacctgccgtttcttcatgtaacgcataatctcgttgagaatttttacttgattggcgttcagatcgttcatagagtgcagttccacatcacgatcgcgatccgtttggacgctaacttcaattgtacgtgcgcgagtggccgtttgtgtgttgaccgaaacgtacgtcttgctgcgacgttgcacgcaatctaa

SEQ ID NO: 1204 - DNA, 327 bp, Aedes aegypti
atgcacgaatgtgcagcacgttgttgtagggacagcaatgccagcatggactctgtacagcgctgcatagaagcctgctcaacaccggtacaacgcgctcagcaacacgtagaaaccgaactaggcaatttcaataatcgactgcaacgttgtgtcatggattgtaacgattccatcaaagataaaatgggtccgaaaccgtccgatgaggacatttccaagtacaccgcgatgttcgaacgctgtgcaatcaagtgcgtcgacaaacatgtagatttattgcccggattgttcaaatccatgcatcaggtgctagggaacaaatga

SEQ ID NO: 1205 - DNA, 633 bp, Aedes aegypti
atgagaagttcaggtgggatagttgtaagtaacgtgtttcctggaaatttcattgaatcggaaaacaaatcaactgcgaaagagttccccgagcacgggatggcctatcaacagtacgcccagtattgtaacgcttactatcagcagttgcagttcaatcccaacggggggtcaatttcgacaaatgttccgccgccaccaatttccggtggaggaaatgctggaggatctggttctcccggaggtggtggagcccctcccggtttcaccaacgcttcgatgtcagccattggcaattccggagaaaatcagccagggggtggttccgatgtatcgtcctcgccttcgtcaggtagttttatgaacacgtcgtcattttttagccctcagcatcagcagcagcaacaacaacagcagcaggatggaaatatgcaaggattcaaacaagcgccaagccaatttggtcctattcgattcaatattaacaaacagccacagagggttagtcccttggtacagaacaatgccttgtcgaatggttctcctcaattgccacctccgcctcaacaacaacaacatcagcagcagcagcatcaacagcaattcaatcagaacaatcaaccgataggtaag

SEQ ID NO: 1206 - DNA, 848 bp, Aedes aegypti
cggctaattttagaggaaggaaggaagctgaaaattgtgctttgggtgggtgagaaaattttcaagacctacgaagattggatttggtgtgttttgcctgtgtggtgcggtagtagaacattccctgtgtggtgcgatagtagacgattctctgtgtggtgcggttgtagtcgattctctgtgtggcgcgatagaagaagaatccctgtgtggcgcggtagaagaagaatccctgtgtggcgcggtaggagtaattcaagggcggtgaatctttgtcctttagttcggtgtcggaggatacaattcctgtgtggcgcggaaggagtatttcaagaggacgttattcgccttggatttttgaaaattgaaaccacctttgttgcagtttggttcagctgaaatgtcacgttggattcgatttcgattctctccctcactggctttcgatgacactccttactcaacgccgattgttattttccaagattacggctctgttatggtttagtaccgtgtgagcctttagttttaagtttgatttgtaacgtttttcgaaaagataaagaggttttgtgcctctttgagaaagatttttaattgaaatcactcaaaggggtttttccctctttcaaaattttagttaaaaataaataataataataataagtgtggtccaaatatccttcaacagtactcaagacggccttacagttgaggtcgaaataagcgtatatttcaatcgatagagctgtattgtaaaattaataggtatgatactaaattcgtttttaatttactcataggtattctacacagtgtgaagcataaacgatttaatgaaccaccct

SEQ ID NO: 1207 - DNA, 342 bp, Aedes aegypti
atggaaccggaccggctgcagaagcgatttcgctccaagcgtcaggcctactacaaatcatcgcgggcgatcgacaccaccatctatccggaaatcctggtcatcgtggactacgacggctaccggttacacggcggcgacaacgtccaggtcaagcggtacttcgtctcgttctggaacggcgtggatctgcgctatcggttgctaaaagggccccggattcgcatcagcatcgccggtatcatcatctcgcggatttgtaacaaactggcacaagtcactagcgatggcatgaaccagtctaacgaacatcgcaatccgcggctaattttgaccagttag

SEQ ID NO: 1208 - DNA, 792 bp, Aedes aegypti
ttcgagcttcgatttttcattttcgattttcaattttcgattttcgaccttcgatttttgtttatcgattttcgatttttgtttatcgattttcgatttttgagttttgtttatcgattttcgattttggattttggattttggattatgtattttgtatattggattttggattttggaatttggattttccattttccattttccattttcgagtttcgaatttcaattttcggttttagtgtttcgatttcttttaacgatttccaagtttcgatttccgagtttcgatttttgattttcgatttgcgattttcgacttcgatttgtgattttcgatttctgatatttgattttcgattttcaattttcgattttcgactttcgattttcgtttatcgattttcgatttttatttatcgattttcgatttttgactttcgtttatcgatttttgactttcgtttatcgattttcgattttgggttttggattttgaaatttggatcttggattttccattttcgagcttcgaatttcgattttcgtttcgttatcgattttcgattttggattttggattttagattttcaattttcaattttcaatttttgattttggattttggattttcattttcacttcttacttttcagttttcagttcttagttttcaatccaaccatttcacatttgttttactgacaaatttattggcgtttgttaagtatttgttttcgtttttgattagatattttttttattttattattcatttggtgtttgcttag

SEQ ID NO: 1209 - DNA, 687 bp, Aedes aegypti
agttttcagtttcttatttctagtgttctgtttccagtttccagtttctacttcccaatttcttgtttctattacacttttcctatattagtttctagttcccagtttccagtttccagctttcaattttcaggtttcagtttccagcttccagttttaactttttacattccagttcccagctctcagtttctagtttccagcttccagtttccagtttccagttcccagttactattttccagtttccaaactttactttctagtttacagtttccagcttcaggcttcaagtttccattttcccggttgcagtttccagcttccaatttccaatatttaatttccagttttcagtttttaattgctagtatccatttccagatttcagtttccagtttacagctttcagtttccatattccagttttcagtttccacttcccagttcccagtttttaagattctaatttctagtggcctttttccagtttctagtttcccacttttctgtttcaacttttattttccagcttccagttttcaggtattagtatcttgtttcttgtttactgttttcagatttcagtttctagtttcaactccccagtttccagctctcagcttccagttgccagtatccagcttctatttttcggtttccaatttcaagttttcatctttctga

SEQ ID NO: 1210 - DNA, 1581 bp, Aedes aegypti
atgaattacagactgttggtatggctgtgtctcctggtgccattggtggcgtcgttgcctcaagaggaaggtcttcgatcgttgctgttgcgaagaggaggacgcgttggaactaaaggtcagttgcaattattgggtaatgaaaggattcttaactcatgggagagattgcagtgttgtaacgttcataaacgcactaacttcaaccatcaacttcatcaccactattatcatgatcatcactctaggcgtaatcgtcacattaatgcaaatcatgttccacataattcacgcttatctcatcacaaacccatcgttgatagccccagtggcttacaaaagaagcaaggtactgcaggcttaactgacgctcaaaagctgcttttagacacagaaattggtaaagtagcagaaagacacgaccaacagttgcgacaacttgcctttgggagttttacgtccttcagtgattattttctcgataacctgaagaagagtaacgtagcggtgggttttgcttttgcacaatcctcaaccacaaccagtagtgacagtgttggtacaaccagtgagatcccgttttacgacgaggtcgacgacgatgcaaaatcagctgctaatgctacgacagttgggtcaggtggcaccactaatcaccattccaagtccgcacagccagcatcactaacactcgatcaatcgacaaaccggtttccaggcaaagtgtggggtgaaggtaccgagtccaagtttgggccaattttggaatatgttctacaacgaattcaaacattgttttcagtttacaagcacgacgacctgagccgacctggtgtcccaatagctgacgctgttgaagccaaatccgaagatgccaaaaccacagaagctacaaccactaccaccagcagtaccgtagctccagttcaaaagaagggtctacatccactattggctcgtaagaagtttgcctattctccaaaggaggccaaggccaaggcaactgaagattccggaactccaaccactactttgaaaactactactactactgctgagtcctccgaaagttcttctgtttcttctttagcaactcgtcgaacccgacctactcgtccagcaccggtagctcgtgcttccgcccctaaggctggattaccttctcgtgttcccagaactaccactaaacggacaaccacaactcccgaaccggaaacctcatctgtaactactcgcactaccagacgtcgcggtggacgtcctacgcgtccatctggatcgcaattcctagctggtaaaaccgcgacggaagagaaagctgtaccggtagctccaacggttgcttctaccccggaagaagcatcaccgtcctccactgccgccactagctcactgccatcttccccagcctcgacggctgcagcccctcctgcagtgttgagcaatacgattcctttgacggccgaagccaccgttgccagcgaagttgtagtcaaacatgtgccattgctgcccgtggaaccggctccggtggttgaagcccagttggacgatgtaggaccagatcagcagctagcctaa

SEQ ID NO: 1211 - DNA, 737 bp, Aedes aegypti
ggcgatagtcgcttttggtgttcttcctgcgtgcgcgaaagaagagtttctagctcgagaataaaacttaatattttttggaattattcagattaaattcgtagttatccgcggaccatacgcaaaacgtgattgtgtataagtactttgacaaaaatggtggaacagcagaaacaaagaatcgagctggaattgtctcgccgcgtagatgaattggaccgcacaatcttgcgtaagatgcagggtgaaatgcacgaatgtgcagcacgttgttgtagggacagcaatgccagcatggactctgtacagcgctgcatagaagcctgctcaacaccggtacaacgcgctcagcaacacgtagaaaccgaactaggcaatttcaataatcgactgcaacgttgtgtcatggattgtaacgattccatcaaagataaaatgggtcctaaaccgtccgatgaggacatttccaagtacacctcgatgttcgaacgctgtgcaatcaagtgcgtcgacaaacatgtagatttattgcccggattgttcaaatccatgcatcaagtgctagggaacaaatgattctagcgttaaaactattaaggcccacttgtgttctctgattgggtttttgtacagaatttggttactaaaaccaattaaaacgatgcatttcacagttgacatcatctagtgttaccgttaaaatatgtttggaaatatattaaaaatgtacaatgaat

SEQ ID NO: 1212 - DNA, 552 bp, Aedes aegypti
atgttgtccaaccgtcgtaaaaggtctgccacaatggtaagggtagatactcgatcgctcggggccattggggcatttaggacgctcgaaaccaaagccgagctgctattcaggttgccattacgttctataatcaacttttgctgcagcgtactatcttctatcttactaactgcattgtccatggttcctaaggggggttccaagtcgagtttactggtcgatttcgcgagggctacaacatttaggtctgtctttttgccaatgacgttattattgaggttttctagcttattgctactgaggcatacatttgcggtggtattcgagtcggatctaggttcaccggatgcgatctcttgtgttttgtcttccggtgtgtcgtcaaccgcgagcgtgtccgctacttccccatcttcttcatccttgggaacgtgtctaactttcagctcctgtttcaaatcccgagcctcgtccataagtcgctgtaacttgatttgcatgcgttccttctcgtcaacctcgagttccaaaagagcattcttttcgtaa

SEQ ID NO: 1213 - DNA, 534 bp, Aedes aegypti
atgtgccgcaagtgcaaaaccttatggatgcacggctactttcacgtagatgaagtggcaagcactaaccgatatgacaagctcattgagaagtgccagaacaaatcctcacgaacaagaaagcagcaggcatatctggattatctcacaagtcgaaagcgtgttactgtgaaatacacttgtaagctgtgctcctataaaacacgtgtcatcaccgatagaggtggcaccacgtccaagtctgtctccgcagccttgacctcacgaaaggaacttacagctcctccagtcaatgtcaccagtaataagcgaaagaagcgcaagcgggacccaactgcaggacttaacatttcggttgcagtaaaaagcggccctcagaatgtaccaaaaaagagcactaaaccgtcttcgtttagctcaaaggaacctagtaagctcaatgctttggccaatatgttgaagaagaagactgaagggatgtcatcagttgggacgttaacggcccaggatcgattgaaattgttgcttaagtag

SEQ ID NO: 1214 - DNA, 183 bp, Aedes aegypti; identical to SEQ ID NO: 585

SEQ ID NO: 1215 - DNA, 917 bp, Aedes aegypti
ctgcaataagcacgacattgtttggcaaacacactaacagaatgacacgattttttgagaagtttacccttttttgtgtgataactgtgataactgcactgtcgctcataatcgttaccagtgtgcaattggcttacgagcctgaaacagtgataaatcgtgataacgacaagctcatggatcagctaaaaagcatacgccaaagttctggttggatcaacaacagcagtgaaaagtgccagcaacatatccatacgaagttattcatactagtgcggtcacccaaaagaaataggaaagtgcgccaaacaatcagagacacgtgggctctcactggaaactaccccaccgtacaaataaaatttgcattaacaaagctaccaagccagctaaacgagcatgaaagcttcattcatagacacctgaaacgttactatcaccaatgtattccgggtgactatctactaattaccaacgacatgcactttatcaacacaccgcaaattataactgccataaaccagcgattaccccgaagtcacacagcaatatgcgcaaaagcgtcgcccaacgaaaatgcgatgaatgaagttaaatatctagggcagtgcaacgtccaagcaccaatccttttctcgaaagacgcggtgcgtggcttattagatttaaatattcacaacggccgctcagcaatggcggagagcattatccggtatggcgagcatttatatctcacgccgaaagaaacactgcgaattatcaacggttcgatagatgccagcaatttgctgttctttttctccgatcgggtcgaaagcgcatccgatatcagtctgctgtggaatgcatcgagagattatacggctgtggaatcttgattagtagcgaataaaggaaacgatgtacttgtaccaaaa

SEQ ID NO: 1216 - DNA, 2301 bp, Aedes aegypti
atgaaaagctcggcccagcgtaatttcattgttttcgaggactttgtatacgattttgagcacaaacagcatgacggctgcgttttctatcggtgcaaaaccagcgacgcatgtccagccacgttgatgctgctgagcaacggtcgtgtgatgcatctggccgattcaatgcacacgcatatgaagcccgatctgaggatcttccgccctgtgggtcgaggctcgaaggaatttaaaatcgtacagaacaaaaacggaagcaacatactggtgcatcgtggccaccggtataccactcctcgatctaagactgatggcgctggcatttggtattgtcacacgtacgttccggatatcaaccgtcgatgctacgttccgattgaactccttcctaatggtcgagttgctccggtgggcgataaacagcacagccataatcctccattcaaaactaagcctgaaccaggtgcggctcacgactccaaagacaacatcgtcaaagctgagcacagcaatggcactgccgacgtcaaggcgaccaacaatcgtatgttactgcatggcggacatcgatacaactttgcgaacaaacgcgacgatggagcaattctttggaagtgtattgaaaaaacttgtaatgcttcgatgtaccgactaacggacggacacattgtcaaaggaccggaacataaccacgatcgtatggaaacgctagataactcgatgaaacgaaagctgtctgattatgagaccaaaccgaaacacaccagcccaagcgtaaccgacagcgattcaaagctatcgtctacacctgatcatacggcatcctatccaagaggtattgcaataaggccgaatccctacattggaaaacctatcatccacgaggggtaccgttatatatactacctgacacgacgtgatggctcggaacactggcgttgcagccggagactaccgatgaagtgccgtggaggattgttcaagcaaaccgacggaacattgatcaaatccaatgaggaaggacactcacatcctccgtatgtcaacatggacgattcagtctccatgtcgtttgcgatcactgaaatgtcacaagaatcgaacgaggattccgcagaggtggtggaagaagtgttggaaacttcaactagtgcggaaccgcagcagcagaagtcgccatttgtagacgatgaaggctcatacgattatgagctcattgatgtcaaagggaagaaacgaggaatgtaccttatccataagggtgccatgtttgtggcaggccacactagaagggatcgagcaaggtactatcgatgtcgaactgccggctgtaaagttgccatgttactacatcgaaatgggttgttagtgaggatgaacgaaaacacgcacgattgtcagaacgccgtcaagactgaggaacacgacaaagaaggtggagatgatgatgaggaagaacatgttgagcccagcaaaaagaaacaacgattggagaacgacgaagccagttcggtaccagctgaggacgacgaaaccacagaagagaaggatgtggaggtgaatggtgatgaagatcccgtcgtggaagtgaaagacgaaccagcggatggacactaggtccgtttcgtactataagcaacaacagtagaggcgcatttgaaagaatacacacgcattagacacttagacagtgccgctactgttcttctaccattcgcataatctactactacaacagtatccgtaagtatttatcttattgatgtaaagttagttcgaacataaagttgatgtaatttcatgtattttgacctgagagcgcagcaatagtcttaatggaacataacaaaagtaaaccaaataacaaaactttctcgcgcaacaatctggtagaacagaaaagaatgcccttcctagaatagaaagcaatcctaattgatgaagataaacaaaacatggccagttgtactctgaacatggaaatgacaatcatcaaacacattttaatttaagggacgggccaagtgcaagtgcagtggttagcacacgcctctcacgccgaggatttgggatcgaatcccgtccccgagatagtctcttgacattcatgttatccttcaaatgtataaccccaaggctcagacaacgtactattttttaagaaaaatactctagaaactatttttcaagataatcaaaaaaaaatccttgcgcaaatcaataaacacgcgaaaacgcagcaacgtaaggaaaaaaatcacaaatcggttcactaacataaaagttacagttaccttc

SEQ ID NO: 1217 - DNA, 504 bp, Aedes aegypti
atggctttggcgtttgccttggctttggctgttgccttgactttggcttttgtctttgcttttgctttgactattgcccttggctttggcttttgccttgacttttgtcatgacgtttgccttagcttttgcctcagtttttgccttggtttttgccttggcgtttgccttggcttttgccttggcgttttcattgatttttgccttgttttttgctttagctctttccttggtttttgccttggcttttgccttgacttttgccttagcgtttgcctcagtttttgccttagcgtttgccttggcttttgcctcagtttttgccttggcgtttaccttggctctttccttggtggttaccttgacttttgccttgacttatgccttagcgtttgccttagtttttgccttggtttttgctttaatgtttgccttgacttttgccttggcgtttgctttggcttttgccttggttttaccttgactatagccttggtttttgcc

SEQ ID NO: 1218 - DNA, 654 bp, Aedes aegypti
gtagagcatcatgtcgatttcctcctcccgcagcacggctcgcttcttgaggaaatcgcgctgcccgccggtgaagcgcagcttcatatcatcacaggccgccggaatgttcagaacccgctggcagagtttcttcagcagggggaatgcattttcgttgcgccagtaggacagcacatcgatcggtgcctccagcttgacgtccacgtactgtcggatttcgtcgtccaccacgtcggccgattccacctccaacgagacgtccataaattcgtagaatttggtctccttcccgatttcgacgttgttcttctttccgctggagtagagcttcttcagctgctctattccatcctgatcgcgtcgcagttgcgctttaacgatcgccagggtttcactgcgttcctcttccgagaggaatcgcagacccttgaacttgggatccaggaagaccgctattttgtggtagtcgtgcagcttcaagctttgcttgatctgcatctggaatgcttctttaatggtcttcatgttctcgtcgtcagtttcctccacccggaagtgtcgctccagcttcttcttccacagcaccacctcggtgattgtcacgttgccttccgacacgagactacggatcggttccttgaaaggagctag

SEQ ID NO: 1219 - DNA, 567 bp, Aedes aegypti
atgaaacagttcatttcggtattattacttgtcgcatttctagctattagcagtgctcatagttcaggtaaagatgtggcaacgaagagcaatgagaacgcaggggcgtacgaggagattcgagtggaatcgtctctcaacgtgcgcaagagcaatccagctgcgaggaggcacgtgagaagcgtcgtagatatattggtgcccgacaacgcacgagttaagcgacagtttggcggattcggagcatccagcgcacaggctaacgcaaatgctttcaaccaacaatttggtccaaatggatttggagccagtgcagccaacgccggagcacaatctttcttcaaccaaggtcctggaggtggctttggagcctcggccgctaattctgcatcgcaaggattccaagccggcccaggtggattcacgggctctgctggacagtctggaagccagacatatcatctccctgggaaccgggacgtaagcttggcatacaccggtggattctctgtagcggacggtaaacctagtgtatcgcaaggaaattcgatcagtttctccggataa

SEQ ID NO: 1220 - DNA, 1080 bp, Aedes aegypti
atcatttagggatgacaaagacaacgtcaggtaatcaaaatttggctatttaactagagtatctgaatgatacgaatttcaagaagcatcgcgtgattgtaaagaatgttttcagcagatattcgctgtatcatattaatttgttgtgccagttttctttctatggtttttggttcagcaaacaatgcaacacatactaaacagtgtctgatagatatgctaaatcaatgtccacccaattcttcatgtgatgagggcttgtgtgtttgtttgcattcattcaaacaaaatcctgaatataatgagcagaagaataacgatttttgcattgaagtagatgcaacattatctcttcccggcaacaaatcaatcacgtacgacaaaatatacagaaaagccccagaaccacatcacatattaggcggaattttaatccccgttagtgcggttatagtgattttagccaccatcgtattagctaagaaaacgcaacttatgcaaaggattcgtttgtcccttttttcgaatcgtcccagaaggcccgcgtatgaagatgttgttttaggtaatgattccgatgatccccctattatttaaaacatgtatttcaagtatactaaaatacactttattgatatttgcagtaggctatgaacaataattccaaagaatgatggattctagagcataaaaaatattgaatgtgaacatcaagcaaggctttgatcaactcgttattcctaatggcatagttatcatcatacaatttaagttcagtaaattttagatatgtaaagaaattatttgatagaaatattttattttacttgtacatatcaatactatttttccataatacatcaacaatgtatataattcatatcaaaccaagtaatgtcgtttagaattttcaatcaattcaattgatttaacttgtatcgtaaaagtattcaatataaacaaatgtgattgattgtcgataattttctacattcaaatagataatgtaagattcaatatgatgtaatgtgaaccaaaataataaaaaataaaaacaattatatcgatttattgtattat

SEQ ID NO: 1221 - DNA, 342 bp, Aedes aegypti
agtgaaactgcgagtgaaagaagcattttcaactcgtgctcgcgcgatttaattatcatcgaagtttttatcgttaatttccgtggccccgccgggtgtaacagtgatcaaattgctcgcgacattgtgcggaagcgtgcaaaagtgtgtttcgtttggaaaaagcgccctagaaggtggaaaattcgcgctggaaaaaagtgttggcattttgagagcgcgctgcgaaaattagtttcctccgtcggagcgaagggggaaaagaaagaaagaagacttcgcacaccacacgaagaccaacatcagcagcagcagccatcaaagttagccacgacgacataa

SEQ ID NO: 1222 - DNA, 1532 bp, Aedes aegypti
gtgatcgctggtgaatggtaaatcgcctttcgaaaacagaacacgcggacagtgtggctacgtatatactgtatgtcatattgtttgaatcagtaccgccagcgagaacaaagtgagaaattcgttacgtgtcaggaaatgatagagtgccgaataaatttcatactttgacgagagtgaaaatactttctgctacaatggaacaacgattggtctgcgttatcattcttggattcggctttatgctgttgttcactgcttttcaaacgatgggcaacattgaacaaacagtgatcaacagcatcaaaatagacgatcccacgtttcaaggagatggatacacaagtctagcggttatatatgcattgctatcgatctcaaactggttgaccccatctgtactgtcgaaaattggaccgaaaattgctatgctcataggagcattcacctactgcttcttcatcttaacttttttgtggccacaaacatggttattgtacgttgcaagcgcaattttaggagctggagccgcgctgatctggactggtcaaggaatgtacctttcaaagtgcagtgatgagtctacaatttcccgcaactctggaattttttgggctatgctgcaaatgagcatgttttgtggaaaccttttggttttcttcctgttccaaggaaaaacgcacattgataacgatacacgtaccctggtcttctcgattctggctggtttggccattataggaattgtgtttctgggagctttgcgaaaaccgaaccaatcgaacctcgctctggacgatgaaattccagatcgtcaacagggaccaaagcaagcattcattaatgcagccagattgttcttcacgaaacgtatgttgcagctcagcgttacgttcatatatacaggactggcgttatcgttcttcagtggcgtttatggagctagtattgggttcaccaaggcaattggcgaatcagctaagcaattagtcggactgaacggagtattcatcggcgtaggagaagttctaggaggagtattcttcggccttctaggaaaacgaaccgccaaatggggccgcgacccaattgtaattgctggattcatacttcatatcattagttttgtacttatatttatgaatatacctgatgcagccccatttggagatacagacgaagttgcgttcatcaaaccaccgatagctgctatcgccattttatgttccttcctgcttggtttaggagatgcttgcttcaacacacagatatactccatgcttggaggagtattcgccagaaactcggctgaagccttttcaatattcaaatttacacagtctgttgcagccgccataagtttcgtctactcatctcatctgggacttcgtgtccagctaggtatccttctagtcttcgggattttgggtactgttactttctgttttgtagaatgggcagtgaaacaaagccgaacaatgaattcaaatgaatgtgaaactgtcgatactaagaaataaataaactaattg

SEQ ID NO: 1223 - DNA, 1002 bp, Aedes aegypti
taggcagtcagtatacgtgtgcagtttgaccggtgcacattcaagtaaagtgctttttcctcgcatggaaattttatttctagttaaatgtatgtctagtgcttctgagtggttttctacaaatattttatttgtatatgatacaatacagctgaaacaaataggattatcagaattctgaatacaaaacatgtaacttcttcggcggttttcgaacgatcgacacgcagctccaacggtttttgatcttctgctgccaattcgaagtttgcgggcatcgaatcggcatgtcgcagcagtacaagtgcttcgtggcttgtgttgggtgctattgtaacagttttgcgatccggtcttcgagccgaaaaatcgatttcaattgttgttcgtgatgatcggcgagcagtgagtgaccagcagtatatcggcatgtaccgaagcagcaattgtgatattatagtgctagaagtatttacgtctccttgagaagaaagttcatcgaaaaaagtggtttcaattgagaagaacactgcgtggggttagtttgtagtgaaactcggtcaattccttagtaaatagttgtaaaaaatggcaaaaatagcagcaggagatgcgctggccccggtggaaggttttggggaagcacctcgaagtcgagtgtcgactggtgccagctctcggttacgagctgagcaaagtgatagtgatgacggtggaattaaattgaagaaggagcttgggctgatggatggagttgctatcattgtgggtgtgattgttggagcgggaattttcgtgtcacccaaaggagttctgctctattccggatccattggtcaggcgatcatcgtatggattctatccggggttctcagcatggtgggagccctgtgctacgcagaattagagttgctgctctctttgatttcaacttgtctcgccaactacttcgacgaagattcagttaggtttttgatagatcgtaagaatggcaatttttaa

SEQ ID NO: 1224 - DNA, 537 bp, Aedes aegypti; identical to SEQ ID NO: 574

SEQ ID NO: 1225 - DNA, 1552 bp, Aedes aegypti
agatatacatctgtactaatgttttgttatctgaaactgatcgaaaaatcctgtggttctgggtttcgaagacaataaacaaagtgctgttctcacgccacttaggtttcaaatgtttcaactttcaagcttaaaacgtttttgattctactaaatgcgatacttttccatcaggacaaaaatcaagtgcttaacaattcgaaacactggacaaattgaaaaacacttacaacagatgtctgtctgctgtactcttatgagtaatgcgatattgaaagatttggaaattgccacagtgaaagttgtcgtcatttcgcttcaatttaacacatcccacaaaatggaaacgcaaacattctccacggtatctatgccgcacgatttacttccgacgtaaatgctaactgtaaaaaaatgtgcgcttacaactcattcatcggatatattcattctggccatagcaagttcccatcagtaagtgcaaactggcaagtgggacgaaagtgttgacgatgaaagcattgtttttgcttgttttgattaccatccacgaatgctccagtatctctatcaacaaacctggggatttcggagaaaacgatcgaaatgcaaccgataggcagctgtcactgtccaggaagaagaggtttctgctttttccagttggtgccgctattttggtaacagtatccggcgcaaaagcaatggtatacaaaggccctggaggaaattttgccatcttggaactggacatgtatcacccgcttccggacttcaataaccgttttacacaattcaaactaggtgaaatatattacccaccaaagcctgcacccaagccagcaccaccccctccaccggtaccagctcctgcgccgccacctccccctgaaaatcctcacgatcatcacgatggacatgaactgtcggaaatggaattgcaagactacttgaaaacgcacccggatacgtgggtacctccaggatacggcaaagatagatctgactggttcccaaagaatacttacaatccgtatccaaattactatcgacaaacaccggctgcaaattatattccattcgaaagtaatatgttggacgtcaatccttcaaattcttaccgtatgagaaggtctggcaaaacagtaacggactatcatattgaagaagatgaggatcgatataatataagtcatcatcgcaactgggagcattactaccattatcgggaaaagcgagacttgtaccaatcacttgaacaggcacttggacagaagcttcgattccagatgaaatcctgtatattgcgcgccatatgtgaagcacgaagtttgcttcttccaccgggcaggtctatgatgatggacattctaaggattgtattcagtgttccactgaaggatgacctccaggatgaatacagtaaggcgatgagacatgaaaatatggattgccatgaagtgtatggaaaggattgctctgtcagtatattgtatctgatcctatttggaaagtttgtaacgtaataaaaaaaaaacaaaatgtaagaaaa

SEQ ID NO: 1226 - DNA, 315 bp, Aedes aegypti; identical to SEQ ID NO: 599

SEQ ID NO: 1227 - DNA, 1461 bp, Aedes aegypti
atgatttttcttgaatactgcaatacccataaccaagccaaaggatcaaaaccggcaggtcatgctggtgttgacggccaactagaacagacacccgccgaggaccggcagtggaaagtggaaaagcgtcacaccggaaagaagatccacatttttctcggaaaaggttcagggaagagcaaaaagtccagcaaaaagcatgccgacagcgatggagctgaaacgcaaacacgtaaaacacccgagttgacaacccgatcggacaaggccgaagatttggccgcctcggccacatccgacgcgccagacgctgccgttggcgaaagccaacactacgaagtccctgagcaccaaatcgtgaaggagaagattaagatcaaacaccatcaccaccatcatcatcacaaccatgtgaagacggtggtcaaaaaggaaccctatcctgttgagaaggtggttcaggtgccggtcgaaaaaatcgttcacgtacccaaaccgtacccagtggaaaagatcgtagaaaaggtggttcacgttccggttgaaaagattgttcacgtgccgaaaccctatccagttgagaaaatagtcgagaaagtagtccatgtgcccaagccatacccagtagagaagatcgttgaaaagcccgtacatattgcgaaaccttacccagtcgaagtgaaggttccgtatcctgttgaaaagattgttcacgtcgacaaaccctatccagtcgaaaagattgttgagaaagtagtgcacgttccaaagccgtacccagtttacaaacaggttccagttccatacgaggtgaaggtaccatacgaagtacctaaaccagttccatacccagttgagaagaaggttccctatccagtagaagttaaagtaccatttgaagtcgaacgaaaggtaccagtacctgtgaaggtggaagtcgagaagaaggttcctgtccctgtcaaagtatacgtaccggttgaaaagaaggttccatatccagttccggtgaaatcccagttcccattcgataaggacatcggatatgcctcaaccaaactgcatccattcgaatcccagcaacatgaagtgagacattacggcgacgagtactctaacggcgaagaaggccaacagcccaaatacggaccatcgacattcccacagcaaaacgactaccaatcgcaggctactagccaggaaagccattatcaccacaatgaccattacggatcgggtacgacacaacaggaggtcatcgtgactccgccggccaacactgcccatctcacattcgatatgtcccaacaatctatgcctcaagctttcgctctcacagcaccgtccaatccgggaactacgttgcagcttgaatcccaaccacagccattccagcttctccaattatcgcccttccagttccaaacccccaccggcttctccctgccaactgccaggtaa

SEQ ID NO: 1228 - DNA, 3307 bp, Aedes aegypti
atggtgaactcgacggcgacgacgccctcccagtcccatggcggcgccctgtactacgtggtggaagtgccccgggaggagtacatgaagcagtgtgccgcccaggcccatgccgcagcttccgccggaggttatccgaatgcgtcctaccaggcacagtatgcggcccatcatcagcagtttcagaatgtgcacaacacgaccatcctggcgcgactgaacagtaccgagtctggttgggacaacccgttccggcccgggggagacctctcgcgggaagcagacgaaatagtcaatctcatcaaaggtggcaaaccaatcacacctactggcgatcagaacctgctgaacggtagcgcaccgaaggacagcagtcacccggcggaaaacggtggcagcacagtggtggacggcgttgcgacaaagctcgatgcggcgcaactccagagccagccaaacggaacgaaatctcctcagaagggtggcggtggcggcggggacgcttcgccccacaagaatggttcgacgggtccggcgcaggggacgcccagccagggaggggcggcccctcagacgacaacgacgacccccgtcagcaaccaggtgatagcgggaccccagtcggcaacccacgtggtcatcgacgagaagaagaagaaaaagtgcgcctgctgcgtaatacagtaattttcccgctgcgtgcgccattgtcgtgtccggtttgacacacgtgtgcaaagtgcatagggaaggaggaggaggagaaggaggaacagtaggcgagagagttgcgtagttacgtacggtacggggatgtgtgcgagcgagtatccatgatggtttttgttattcgatgagcaggctatgcgcgtgtgtgagtgagagaggaacggaggaatttgctttcatcgttgtcgaaattattgtttatttttttgtttggttagttcgttttgtaagagtttttaatgccaattttaagttgcaagtaaccttaattcttacattctcacaatagtgtcagtcggaaattatgacaagagtagggcaagttgtttactttacagtgggaaagtatcgaaattattttatgttttcttgggaatgacagaagcgaatggaaacacaatttggaaaggaaacaattacgattatgtatctctgtgtaactgtaaacctatgtaacaatttactgtaatttaggacaaataatgcttcgagcgtgggtttgtgccggcttctatcagagtaggaatgttagaatcctacctttttgaggagctatcggtacggtccacaaaactatgttttatatataggattttaaattaacagactcagtttcttatttatatattctaaagcatacaaaacaatggtaatcttctttgattagtattgagttaagcaatgttaggttcggaagttggaaaggatgatattctgaagtgctagaatagaaggtgcgaatttcgagaagccgtgatcctgttcctgaatgttggcagctttttcagtcaacaatgggatgagaaaagtcccatgccaaaatgaaaaaaattctgttgactttgccattttcttgtaaggacggaactttcaaccatatccaccccaaacaaatgctatattgttgaaattgatcacggcttaaattgtacgagaagtcaaacgtaaagcagtgaatgagctttctcagtcaatgtgttaaaatgtgtatattatttcgtaaatcaaagcaagcattgtatacagagtcacacattcattagaactgtagaatccacctcctgtctgttggaatcgaaaatataagaacacacatcaggtactcagtcggtaaagtaggctgcagcgataacggataatgataaccgctgttacgcagtaggcgctggaaaataaaaaaaaacattgtagtaaacattaaatcgtaactaaacagaaccacgtgattgttagttgaagcataataattaaacaactgaaaaaaaataatgtttaaagtgtcgaaatagtttaacgaaaactgaaaaatcagcatgctttatgtgctacaaaaagagtattgtaatcgagggattaacaaaaatcaatgcaaacatccctgcaaaacaacagtttcacgcgcctgcacgccactccgctctcccgtaaacttttgaaaacaacaaagaaaaaaccgtgtacccaaacgatatccaaatagcaacaacaagtaataacatcacactgcgaaaacgataactaatgtgttaaactacaacttgataagagaacaaaaaatacttttcattacgattccgtaagaacaactcactactcttaaaatcgaacatcattgactatttaacggatatgcaaacttgtgtacactttttgcataactcacaactacgcaaaacaaaaagtataaaacatctttaaatggcatgaaagagaagcaaactaataagaaaaaatcctatttaagagcaaatgaaaaaaaaactataaaaggatcatatttacttagcaaatgaaacagaaattaaacaaaaaaaaacaattacacaaacacacacaaaaatggattattaaacgtatatattttcgtactaaagaaacaagagcaaacgaagcatacaaagtagagatgagaatcggaacaagaaataaaaaaaccgtatggaaagtaaccagggtcaggagtgtggaacaatacaaaacagacgcgagtagcgaaatcaaacagaaatgtggagaggaaacaaaaagtcacgttagacattgcgataacaaacacacacgttacacccaatgtagagaagcgcgcgaaacagtaattaaccaccaaatagggaagctggattcggtaggcaaaatccaaaaaaaaaacggaaaagcgaatgtacagagatagagggtttttgagatttgagatcggtggtgtgtcacgagtgtcggaaatggttggaaaatgatggcaaagaaggttggtagcgtttcggagtagaagacgaagaagcgaaaaagtgtcgctaccaacgaggacgagcgagagagtgtgtgtctaaaaccgacagagtagaacctaatcgtttaatggacagaaatatggagaataagagatgaaacaaacaaccagaacctaattaaaaactgatataaaaaacctgaaggaaataaattaaattaaaaaaactaacacggttctgaaaagtaaggtgaatacgctgttgtagttgtgaaagcattgaagtctagtggaaaaactactatcgtgacaaccctggagcagtgctgatagactcacactcaaaatctc

SEQ ID NO: 1229 - DNA, 614 bp, Aedes aegypti
ccacacaaatccgtacacttggagcacaataaattcaccggcaattaggcactgattcctcccgatcgagcaagagctttaatttttcaccccgatgccggacaatgaatcactctttttccaggcgacgacggcggcggcactttttggctccggttgttgttgttgttttggccgctgtgaaatcttcttcttcccgattctccggcgactgcggacttcttctttttctgcgcccccttcgcgaaccaaccaacacaaaagagcacacaaaacttcttacgtttttttatttattcctatctccagccggagcaaaagcacacacaataattctgctgatttatttctgcgtgttagtgcacttttgcgttcacttccagactattccgacaacgagccgaggaaactccgcggcggtattttttatggatttaaatttccgacttggccgaaaaacaaaaccgggtaccgtttctccgttttcgggtttgattccgaaaaatgacacaccgattctttcccaagtaggcacactgcggttgcaaggcaacaatgaatgaaaaactaaaagattattccgagctagaggaagaaaatccgcgaactaaaca

SEQ ID NO: 1230 - DNA, 498 bp, Aedes aegypti
atgatgtttgcatcgtttccgctcgggaggaaaagcctctccacctcgaatcgggaagaaaacgagaaaaaaaaaatgcgaatcaggaagattgctgcttcccagttgggcagtcagagtgcgatcgtctctctcggcgggcaacataaattgtattttaatttaattgaaacttattttctgccacaccagaccaccgcaccgaggagcaaaattcactcggatgccacttggatcccttcgctgagtcttctctgctggtctgctggcgttgacgggaatacttcagttgcttttcaattttatgtgtcctcgagagggttaggtatgcactgggaatggcagtcttggcagcgcaacttggaatggatgacgaccgggaagcgagatgtgtttgctttaaggagcttgtgtcacgagaaatggcgacgaagtggaacaaatcgctggaaaactggtgtgtttttttggtgtttctgtcatgattgcttaaactga

SEQ ID NO: 1231 - DNA, 850 bp, Aedes aegypti
gtttgacacaaatgtaaacaaaaattcaaaatcaccggctcagccagaagcagtttttattacttttgaatcattagtaaatatttaaataattttaaaattaaacagtgaattagtttaaaaatgaccagcacaaattctccgtcaaatgttttagctgaaacccgttccttatctcagcggatgcgctctgcttacgatgtatctcgcagcaccgcaaccatcggggacgttgctgtatcgctagatgcacttcggacaaacctatcctctctgatcgtgcaagccaaaatccggatccacaaggcaagtgtcaatcaaacggctccccttacggagaagcaagccaagatgctgaacgatgccatctattcggccagttcgattctgcgaaagcaagaacagttggctagtgcacagaatcggaagcgaacggaccaccaaaaggatacgcttcaagtcagcggggaagactttcaggagcagatggccaatctgaacaaacagctgaatgccgtttcgatcgagatggcaaagctcaagcgggccaacgataacatcatgaacatttactcgaattacatgttggagaatgaggaggaatgcgattcggatgaggaggaagatgagagcgattctggggaggagaataacactatttataagcgtgattgagatgggtttctataggtaagtcagatcttaattttatcctctagatgtttaaatatatgtaacgactgattggttatatcaatatgtattagtttgcactgaattatatatcacattcatttggattaatactatcaatagttgtatgtagtatatcccttgtcatttgttcagt

SEQ ID NO: 1232 - DNA, 528 bp, Aedes aegypti
tcattattcgctacgatgaaacctgttcctcacgtgctgtttgtatttgccattggcatagtgcaaattttcggagcatgcaatttaggatttggaaagacaccaccgactggagtacagttacacatcttgcatgcccgcagtggcccagaatctgtaccgaaaaacatgtcattggtgtttgattaccaggttagcccagtggaaaacgtcaatataacgtatgtgaatgtgactacttcactgacgaatggttgtacattctcacatcctgctaatggagatattacgaaaggatttaagataaccgttagcacccacgaaccggtactagagctgagcggtactgctattgtctatggattgcgttatggtaattggtaataatttagccgtgagaaagttatttaggtgtacataatgaataaaacttaggtgaaatgaacaatcctattattatactataacagtaatacgtgaaaaaatgaataaaatatcttttgagtaattatgtctgagacaaaccaa

SEQ ID NO: 1233 - DNA, 156 bp, Aedes aegypti
atgcaatcggatgattcccacggaggtcggcggattcgcggagatttgcatcagcttgtgaagccgctgggcttcgttggattgttcctgttggccaagtatacgttctggtcctacatatggcgccgtggcagcgactcgacgaccaagagatga

SEQ ID NO: 1234 - DNA, 1238 bp, Aedes aegypti
ctgaaccatcgtttgtgttagagcaatgacatctgagcaaaaatgatcacatttgcgagcatcagaacatttgccacggcaataaaaaaggccgtcaaaaagccaaagcagcttaaccagaaggctcgcattatccaaaatttaaactatgaaaacaaggcactttttggcgccgttaacaagaaggaaacggatgaattacctcgctccaaccgacaatccacaaatgtattcggcaaagattccgaaatgtattggctagtgcatagagacaaatctattagaaagaatgatcgatgctcgagtaacgatcagcaagtgatcatcagcaagtcatcaccggagattccattcaataccaaagaactgcgttcagtgttgacgttcccgttagtgccatcgtcgaatggaactctggaacgatcatggacccgtcacgagcagtatgaaaccgatcgctacaagtcaccttcggtgaacaaaatccttactgccacaatgtcggaagcgtcgcggcagattttgctgaagtggaaagcatccaaaattgctgagttaggcgaggaaggatttgctgagtttcaaaaggcgactttggcaagaggtagtaatttccattcgtgtctggagagctggctcaaccaggaggatgttgatcgtgataagctggagagagcacgtgacttgtgggctagcatcaacggatcactggaaaggatcggtagaccagctcgagtcattgagaggaagatttaccatccgtttctacactacaatggagttgtggattgcgtatcctcgttggacaacaaactacacatcatcgaatggaagacgtcggagaaccaaaaagcttcactctcgtcaacctacgatgccccggttcagctttgtgcctatcttggagcattgaaatcggatcccgagttcagtgggctggacatagctgggggagccgtattcgtggcctatacgagtggaaatcctgcccacgttcacttgcttaatcctgagaggctacggaagtattggtccatctggttacggcgattgcaagagtattggatacggtatcgggataataccttgcctgagccgatttgagggtttttgaattatggtacctacaataaaatgtgatgcattttaaggtcgaatcggcacactcaacgtttgtgatttgttttcttcattttacataagctttgattttgcaataaaaagtagacgacaacaag

SEQ ID NO: 1235 - DNA, 1594 bp, Aedes aegypti
aaaccctttcaaagaaaaacaaacgattttgaatgaaacacgtgaacgtagttgcacccactagtgcccacgtgctcgtaatattctcagtgggttaatgtcagggagtgggtgcaagtgtaagcgaatgttttcaaaattatcattaggtgctctgtcaatccatcggttgcctagcgactatcgccaaacaattttcggctgttttcaccaagatttcgacggtgttaatcaccatggattaagccaatatcaacgcaaaaagaggtaattttgcggtacgaaaacaaaacacgatcccgcacgcataccactttgtgttatcgagaagagcgcgttcgcaagtcgctggaggtggattctgcattgctcatttggtgaaaagtgtggtgagaacgaaaacgggtgagctttaaagcttatcttgttttcaatttgacggttgaaaatggcgcctagattttggatctacggtttcaacccttttgaaatagacggcaatggagatttgcaagaattagatctcagtaaatttgtcaaagatacccagggtgagattataatcgaacttactgctactcatgctttggttgcaaccggaagttcgcttttatcatactcctgcattacggaaacatcgcacaccgtcgactgtggcagtcgaattgctcatctttcggcaaacaactggtactgtttgatccttttgaagaatggccaccttctgaagtatgatatctattcgcaacaaacgaaaaaacttgattttctgtcggttgaaaattcaccggaatctgaaagcgtggagtcaatttctcacatcgcatgtggtgataaggtatcgattgcagttactagcccagggaaatatgtattcaacattcccaacaagacgtttacttttccgaagcatgttcgcatccgaaaagtagttgtgggactggagcattgcttgctgttgaccggaaatggcgacgtgtacagttggggctgtggattacgcggtcagttgggcaacggtgcgataactccccataaggagcaaccgcagctggtagaagccctggcgggagtcaaaatcgtggatatcgcagccggcggttggcattcggcggccgtgtcctcgtttggagatctgtactgctggggatggaacagcaaagggcagttgggactgatggacgagaaacaagtcaggggaactgtgtttgcgctacctcaggtgattgaagtttcggaacaggaagacgatcagtcgcaagaaatctccatagaaaatgttcattgtgggaattgccataccgtggtgataagttccaaaggagaattgtattttgctggaaatgatcttcggaaaaagctagattatgttaacgttgagcgaaatccgaacctgagtgggtttaaaaagtttgaaagctttccgaaagtcgatggtttgaagcttttgaaaagtggagcgaattcgctcgtttttgtgagcgaatgtggtgatggcgaaatgtcgccatgaaggataaattaaactaagaagttacgctattgtacgataggtggctattgttggaaatttatgtaatgatttttactgtaa

SEQ ID NO: 1236 - DNA, 522 bp, Aedes aegypti
atgttccggcatcacatgacccagtacgggtcctgcgccagcgaggtccacaaaacgttgtgctactttttcgcggccctcaatatcttcctggcgctggacatgctcgccgacttcagctcggtttggttcgacgccctggacgaatccagcgagcagcggtaccacggtctcacgcatgtggaagcctacaaaatgctgatgggcgctttcatagccggaccagcgatcgccaacgtgtgcctggccgtcatgttgattatcggcgtttataagcgtcgccccaccctaatccgagtgttcagacttttcatcctggcgcaagtggttgtcatctgtttcatggccttgttttcttactcaattgtattggaacacagaggaagccacacgatcatgctcttcgttcttgttgtttccatcgctctgttcggtgctgaagcatggattgcaggagattaccacaagttattactggaagagatgcagttggaagagacagcctgtcttagagttgcttga

SEQ ID NO: 1237 - DNA, 1284 bp, Aedes aegypti
cgcgaagcgcatttttctgcttcgttattttgctcaacagatttcttaaatttaattttagtttttcctaaaaattgtaggtttaatagcactttttcaaatgcattaagttttgtaaaagcaataaacttgtgacgcttcaagctgaatcgccattagtgtttagccggccacaaaatggtccgtccgaagacttcccgcaatggaaattccaaacggaaccgcaccagctaccaggaagaaaaagtcaacgctaaattaagagattacgatattttggccgatagtttagtagcaaatctggaatcaattttcaatgacaaactcgaagagctgtcgctggcattcaaaatggagaagactcgtttccccaaacatgttctccagatgcggatgggcgatctccggctgataggggccagcacctttgccgatctggataaaattacgctggaaccaccggcttgcgatggcatgagttcgttgggatcgagccagctttccagcagctacaatacgggatccaagggcgagaagaaacaatcgcgcgccgatgaaggatatcttacagaggatagtgcaaccagcaacagaaactccgacctgctatcgtcagccaagggacggccctacggtcccctggcatcggccatgaaaaatagacgacgaagtaaatctgtttcatcgaattccactccctccaagcaccattcgtcggtcctgttcgggatcaaatcgaagaaaactttcggcggttctcaatcgctgttcgctgaaagtaatcgcctgtcgcgatccaaattccgaaccccggtgccgggcagcagactgaagcaaaccgtaagtgccgatcgtggtatgaccatgatcactcccaaagtacaacccaacacaccgatggccattatgcgccatgctcggctcggtgaaagcatctattccattaccggaagtccggtcatcaccgctgcgatggtggaagaaatggccaacgttaacattccgatccagaacggcatactgtcgcttcggccgaccgagatggactcgatcgatacggggttggtgcagaaaatcgattcggacactttggagcacctgaaaaagctacagatgaatctgaataagatcatgcagatggccgagggaaacaatttccagcagatgtaattttttcattcacgtttatgagctttaaaattttgaatcagtagactgttcttttttatgtattagttacttttcactcaataaatgtaattccaattgtgtcttaatgcaatc

SEQ ID NO: 1238 - DNA, 1190 bp, Aedes aegypti
actgaagatatctgtaccatcataaatcgtaccttatttgcgcaccggttcgctttggctatgataaagatgactgatcgcaatttgttttttttttattttcgctacagtcggcgattgtttgcgatttgtgaaaaataataggttgatggtatgtgtgtttgcccgaaaggctgtcgtagtttgtcgtctacaacagagatagtgaaagccctgatatgattaaattgggtacatcgtcattattcacttgatacgaactgctgctgcgaaaatggtgctgacagaggcaacttctagtaccttcaactattttgcttttggaagcaatctcttcttgaaacggattcgcatggaaagccccagtgcagtgagaaaaggaataggatatttggaggattatagactagactttttccactatgctgcacgatggcgaggcgcgcctgcgacaatcgttgaagacaaaggtcaccgagtgtggggagcaatctggcaaatcaatatagaaaaccttcctgacctggacaaacaggaaggagttcacaatcaggtttacaagcctcttactttgcctattcgtacctcatctggtgaagtgctccaatgtcgcatatatcaactcgtaaaaaatccaccaaaactagaaggtactgaaagtggtcgaccatttgagcggcagccgtcgaaaacgtatatgaatatcatcgttcgaggagcgatagaatctggactaccgtcggattacgtggaaaagttgaaaacaattaagcacaatggacactctggtgatccacactttgaaatcgatttggctgtgcaggataaattgccttaaatattgatgttattctataatatactagctaattgaacgcgaaataattgttttcgactacgcatagcgatggtcaaatgaaaaataaatctcattattacttttctaatgatttttttatatcgctttatctttaggtcagcaaaaaaaaaaccctttagtttgagaattttataaggactatgaccaaataaatttgtaaaatcctctaattttctgtagctttattttcatccttgaaatgttatagtatattgaaaatatgattcaaaattattgtaccattgtttataagaagaagaattctgcagactcctgaaaatataactcaaggagtatactgttcatattc

SEQ ID NO: 1239 - DNA, 1042 bp, Aedes aegypti
catagttgattagtggatccgagtgagtgacctagccacggtacgattgaacggctctggctaagaagaactggttttactacttatattatgtaggtaacattggcagagacttgtcgcactgctggaggtcgggtggtattcagtaacaccattcgcgctaaacccgttagaccagagtgagttatcggtgactctcaagtatggtcctgtcgtatgtgaccccttacatccggcacatcgttgtgatagggctggccgcggtcctattcgccatcctatcgcgagagccacccaaaggagctcacgacaagcaagcgacgaacttccgagaacaccaacgactattcacggaacaggaattggtcgagtacgatggccgtgagggaagcaagggactctatctggttatccttggatacgtgtacgacgtgcagaaaggcgtgaagcattacggccccggtgaggcgtacaacatgttcgtgggtcacgacgcgtccaggtcgttcatttccggtgactttgaggagtacagcccggagctgtccgacgtgtcttcgctgaccgattcggagctgaagagcatcgtcaagtggaagtcgttctacgatgagaactacacctacaaaggcaagctgattggacggtatttcgacgagcgaggagagctcaccgaataccacaaggtcgtcctgaagcgggttgcccgagctgaagcagaggaagccaagccaaggcaggagttcccgtcgtgtaacgtggaatggaagcaggaaacgggaacgaaagtgtggtgctcgtcgagaagcggggatggcgtggaacggggatgggtgggcaagcctcggagatacgccaaacaggaagacaaatctccgtactgcgtgtgtgtgccggatgggacggaatccgacgcgttagtgcctttcgaaaactgtgacgctagcagcgagagctgttatgtgaaggaggagtgagattacctgaagtatattaataaggagctgccagcgcaacaatgcaataaaagagaatgtgtgtt

SEQ ID NO: 1240 - DNA, 577 bp, Aedes aegypti
gtgctagttatgttttgtgtgcatttagataattgctagtttctttccaaaaaccaatagaattccaagcatgacgagtgggaaaccttccaaaccgaacgttagtcatccgcacagtgaaaacggtcaccagctgttcaacgagacggagaaaaacgaacagtaccgccggggcgtcaaaatgctgcaggagcggtgcaaggctatccagaagaacaacgagcggattgtgcatcgattacaccttgtcaaaaagctaactaagaaacggaaccgggaggtggacatgctcaagaatcgactcgacagatacaacgatggctggagaacagctccccaaccggtggcggtcaagctggaagaaagcaaggcttcggagtaagtcttttgcgggaaggtatattaaatataatcgtcttaagaagctaggcaataagtgagttaacagaaatagacatattcaggagttgattgattttttttttgtaattttattaaatattaatgcacttcttatgtatcacagccaatctcttaaatcgttgtgtttagggttaggcgatacttcaacattctc

SEQ ID NO: 1241 - DNA, 2283 bp, Aedes aegypti
ctgtagccggcgaagtagtagattggaacagggaagtaatagaacatcattcaaaccccagatgtaaacaaacagtaattaaacggaaaagcaaagcgtgatagctgtgacatttcaacaatcaacggaaaatttacggtgaatgttttactctttcaagttaaagttattctacactgattaatggagaaagtctaatgagtgattgaatatgagtgccgcaaaccaaactatcattgccgatatccagtccctgaccggagatgagctggctgaacaatatcggcgattggctgacgcctaccggacgttgaagcgatcccacgaagaggaactgcaagcgagctacgaactgcgacggaattaccagaccgcttccgaatcggtagcctatatgaccgccgagttggaatccatcgattccgtgcacaaggatgagctggccaaactgaaggaaaaatacgttctgacactaactggcctgaaggattcaaatgcagatctcaaacagtacaattccactttggaagccacgatcgacgatctgcaaaagcaaacgtcacaactcaaggagaaaattgaagaactagaagcaactggcgggaattccgaatctgtaactggtaattcaactctaacttcggagaaggaagcgtatctggagagggaaaacgaggaattcaaacaggtgatcaccgaattgcaagagaagaatgattcgataatgctcaaattggtcagttcggaaagcaaagttgaaagtctcagtgagaagatcgaatgcgtcgaagacaatctgagttcgaaaaagcaagagctggatgagctgaggacactgctggattcgacccaggaggagaacatgcgcttaaactctgaaattgctgctttaaggagtgcaccccaggatgctaacaagaaaggaaactcattgttcgccgaagtggacgatcagcgacagaagatgattgagatgttgcagaatcagcggaagcggtacaacgaaatgaagaaactgtacggtgaaagtcagttccagattcgacgactgactcgtgaaaacgaggagctttgcaacgagatcaaagcatgtagtgagatgttcaccaaggcggacaataccttccgagatgaaaccagtcgacagattagttctttgggaaaggatgtccaacagttgcgggatcaactggcagcgactgaaaggagactactggagaaaaccaacgacatcaattgggtggatccttttgtttcgttttaccgtaacgaaagtggcaatttgaagacagcactgttccagtctcaaatggccaagcggctcgtggacgaaatatgttgggaagctcagcgcgatttggctaaatggcgtttcgaagctctcaagtctcgctacatcataatcaatcgcgagtctcttctagaggaacatggaatcgcttacgaacctttggacgccattcaagtgggcattcacatagacgaggcaaccgttgctagagctaaaccacacgtgggtttcactcctggtgtcattgagtctacccaagaagtgtgccacgacattgatccactgggtgacttagaacaagatttgaacacgctttctttgggtgaggtgaatcagcctccagctttgcttccacctcctcagccaccagtgctactcacaaaaccaccttcaaaaccagccccggaaaaggttgaaacgattacaccacttgctacacctctggtaaccccgatacaatctcccaagtccgaacagaaagactccaaacattccctaaacgcgccattctaccgggatattgtgtacatcccgaagaatgcccccctcacggacagtctgaagaagaaacattttgccgaaatgctagaaaaaactacgaaatctgcggaagctttcaaaacaacatccgccacgaaagccagggctgacgaagagaaggaaaacgttcaacaagtccagcagcagcaatctggccaacagcaagattcctcacagtctaaggcatggggctggatttcggaaaagcggaccaagaacaacatcgtggtgagaaggttcaagttcccggaacgaaaagtgcccgtcgatggacagaaggatgcttgaaaatggaggttttgcgttaaggacgttttgaatgaggtttcagagtaaagaattatttttattcgatataattatatgtatttaagctatcgtgttattgttattgcttcgaaaagataaatacctactacattagactggccccaaaacaaaaaagttgtaaa

SEQ ID NO: 1242 - DNA, 940 bp, Aedes aegypti
ctccgtaacggttttgtatgagaaattcaacatttttgtaaggaacccattgtagagctagcaaattgttggccgactggtcgctaaaatacacaaaatacgccaaaaggataagcgaaacaaaatgagcaagcccaccaaagctaactacaggaagttcttcctccggaacgtcgaaatccctctggccaccagtaaagcacaggttatgaaagcttcccaaaccgccaacaccaaacagattcctaccgttggagcaaagcgctcatcgctgaatgacaaaccatccagtagcagcgtatcggtaacgaaaccatccggttctgccggcaacaaatataaggaaccggaattacacagcgctctcaatgtccgcaaagagatcgaaaaggttaaatccttgcacacgaaaccaccaaccagcatcggggaactaacgccgaagagtaagaaattcgtccgcgatcaggtcaccaagaagctcaacttccaacacgatgagaatgtctttaaaggattggttccggtgaatgtgaacgattcggtactgatccctaccaccaggaaacctttgaggagttcgtacgttgcgaaggaaaagcgagacccggagccggaattgggcgacttcctgcggcccattgccaagtgtaacgtgccgttggagccgtacttggcaccccaaatggccccaaggcgtcccaacttcaacaattttgaccacatactggaagtgttcgccaaagtcgatgtaggagcttgatgggttggatgtaggttacttctagtttaggttattgttaatgcttatttatatgcgctataataatgaatgttcaatgtgttataagtaattattttgtacagtagttctaaattgttcttcaacatgtttggatctatcgataattaatgaataataaacaaaatcatttcagat

SEQ ID NO: 1243 - DNA, 1383 bp, Aedes aegypti
caaacgtaaacaggcatcggacaattacaccgtccacattttttggattcctgatatcgatgtcattgctactggtccgattcaaacgctgaatgttacccaccgaatcaaagtgttgttgttttggaattcgatcgcgctcgagtttttcggagattctcgactggaaaatggttactaaacgatggcgtatcaaaaaataagaaacatattggaggacaccaaccaccgaatcgaaaaattgcacgtgccttacgaaaatgaattccggatgcaaatcaagtatcttcatgtgaaagaaaaggacatccttcgccagttcatttttgaacaagagtggaacttaggtagctcgaaagtactgtccatgttacaggaagcgggaatcgttactgcctccgaatatgtgcttcggctacgctcaagctcagcgattcaacaggtgatgaacgatctactggaggttgaacacattcttctggccgatatcattagcaacgcacacttggacacatcctactctacgaccctccgggaagttcttcacgacagtttcaattccgttctggacgaccttatcgccgaacccaatgtagtcccgtgcaactatctggaacagctgaaatcccatctacccgaaccggacctgactcggctacgtacccaacacctgcaactgcttcttgggaaggagaaacttcatgcgttatccgaggccgttggtctgcaagagcagtggagagcggaatgcgaagatcgccgaagtaccacattagggcgaataatgctggaagtggtacaagaccaggccaacgcgatcgaaacgcttttcgcctcggcaaaaacgaagagtttgtcctggaagtactatctcgccctgctgcacctggtggcagttgcaatcgagggcgataaggttgaaattgttcgcgtgaaaggcattttgaaggacctgttcaatcgagtggtagatgccggagactttgaaaccttcatgatcctgatggtgagcgctagggagatttgcatgtccaatgaaaacgttttggggaactattccggttggtataaggctacgataggtgaaatgagttaccgaatcaagaaggagcagtttgtgcatgtggtggaactaatgacaagattgatcggcctggaaaaggatccggaagtgcttaaggtgcacatcaacatctcggtgagtactcctccaaagtgtatggagttgattgtgaactacaaacaactatgcagagcccatctagctaaactgctcaatgaaaggacacgcgacaatgtgagcatggattgtgaaacgtccattgtcatcgatgatgattaaaaaccattgatagctttataagccctgtattatttaccttc

SEQ ID NO: 1244 - DNA, 546 bp, Aedes aegypti
gtccgcgttcgcgtttttctcctgtgcttttccgcgttttctgtgatttctgtcgtgaaaatattacgaaaagcagaataaaacggcccgattcccaaaggaggcagttatcgtcgagtaccacaaacgtctagtgcaccagcttccgatctggctcatccaaaggatttcctcatttatataatgaagcagcagattttgtgctccggcttccgagtttgccggtttctgggatgtgggacaagagcttcagcctgtatccatccatcccattcgaaacatcacgccaaacggaggaaacagacctattcatcgaacggaaccaataggtcgagtaccattaatcggatcataacaaatggttccgatatatgtatcgaacacatcgcattctctaggtcatggtccagccaggggactgattcggcatttcattcgtatgagtatagagcatataagtttcataattattgaatatcaaatgtgatacgttataatatgttcaaataaattatttagtgctgtgtaaaatcacaggtattgagc

SEQ ID NO: 1245 - DNA, 1595 bp, Aedes aegypti
cttcaaatgtttgcttgatttgctcgaccatagataaaaaaagtttacattttcttccgatgatcccgaaaataacggcaagaacgaactccattcatgcatcttgataaaattgtttatcgcggtagtatttcgatttttgactgctatttccgaaaattgctcagcactcccaaatctttcattgcttccactcctagacgattcacagttattcctttccaaaatcgcattccttccttcggattgtatattgacatcttgagaaggaagaccgcttccgaaattctccagttgttcaaattccgatcgtgaatggtttcgtacgggaatttttttggtttatcccacttctgatgttttagtaaaacacttcttactcttttgaacgtttatttcggaatgtcctttgtaacatgattagtcgctgtcagtgaatgtccaggcctacttgttagcagcttagtacttattaataacataactctactacagtcttcactgtcaagcttacccagcgcttcgttatttgccttgaaggattggccccaatattttttgatatgtagacgcacgctgccatcatctattttgatacatatctcgcccacccattttctttacgatataacgaacgacaacactaatataacatttcccgatctaactgtcattttaacatcctcaatccggtgctaaatgttgttcaacatattgtataaaaatctccttccgataaatgttctacttgtatgcaagcagctgtcatgcgaaaccgaacaaaatttgttgaaaataaatcatggggttattcatcgggaatacagtattagtcaacaaacttgttatcagtgttagatgcaaacaaagtcaaacatatttttacttcgattcaaagtcacagagcattgaaatgcacgatttactaataaatgtcgccaaagaggatgatgtcgttcagattgtccacctgcttattgaccacttattggaattaccaaaatctgccctcacccgatccaaactggcatccgctctgaagatagtcaacgcatcgtcggaagatctcaccgttacgcttcggttgctggacaatctcatccggcagtactgcctcggggagatcaacgaatccgaactgaagtctcacttttccaatctgagctcgtcgatgcaaaccgctctggtacactcggtggaactacggaagccggagatttgccagtttctcgttaacaaaatcaattccaaggacaatctgctgatggaatcgtttgattgggacgtaaagtggatcatggggaacagcagtttggcttcgacgagggagcagatcgctaccgtaatgttgaattgtcgagacaaggatcagaagctgaaaacggtgcgtttcgagatgaatcgggaacggttggccgatatgatcgaagtgttggaaaagtgcgatggaatggatgttgataaataaaatcagaaatagacttttttgttttatttttttaactcacttcaacttgaagattgtaggacatttctcagaaaccccttccttaggtgatatttcacagttattaaggtgattatagaacaaagcc

SEQ ID NO: 1246 - DNA, 683 bp, Aedes aegypti
cttttagattcataattttattcattcaaggccacagacgtcgaattttgtgctctaaaatcacttgcaattcattttggcttttacaataaactttgtattcgagagatctcttcgcaatggccgctacccttaaaccaaactttacctcccatctgtgcagcgttgaagtgtgcgaagtgcggtacaacattcgaattctcaaaatgaaggactcggtcttcatctacatcggtgaacacaacgcagagaactttgacgaactgtcgatggccatgctgatgccaacctcgaacgaaatgctatcgaccaccatcatgggagagccggttggggccggatcggaagaactggcccagaagttgtccaaaaagctgaagaaacaggtctacctgagtgccaacgtgcccaacgatagaatagtgcgaccaacactggaacagaagctgttcgaagagatcaacaacaatctggagtgcttctgatgtaggaaagggtgtcgtcgtgggaattgatgctgccgtcatccagaagactaagcattttctgttatattgagtatgctgtaccttcggaatccgactattttaaaggctttttacgtaaactgcctcaatgcaaatatgctgtggtagaaaaataaagaacttttgtttctgcttgaccaatgggtcgttctatat

SEQ ID NO: 1247 - DNA, 2049 bp, Aedes aegypti
atggcgtcgatggttcagccgagtgaacatctggacgaactcccaagaagcctactagatagtgtgctgtttgtggagaagatagtgctgaatcggaacagttcagcgcttgctgtgattaccgcggaccggcagttgctagaagtaaagcaacgatcgatcgtcacctgcttggatttgggtggttgtggtgttggggatataaggcaagctaaccatgaaccgccagttgtatccagtatttttggagcactgtccccaacgaaaccggacgaagaaatcgaccgcagaatagttctatcggtatttcgttcaatcgatggtgcggatagaaaggttttctatttgttggaaatggagaggaagttggtggttgtggaacggaaacaaagcccctgtctgcgatttgtacattgtcaaacttttgaagggtttattaaacttgtgataacggaacgggatgaccgtccgggatgtccagtggtaaaaatttacgtcgaacaacaattggagccgattgtaaccgacttccattcctatcggatggagtcgagtgctgatagcgtaaataacttcacctgctttcatgagattttgaaggctttgaaagaacgtgtgaatcaacgtcgggcggaattgaccgccttacaagctgtaaccggagagttgtttgaacagataaatgggcagctgaagcacgtgcctagtttgctaagaacggagaatccagatgaaagacagccactggtcaagtatggagatgtttggaccaaggtacataacggtctgctagttattggagttccggtgttcaattgcacttataaaagacgtctcacccttacaaatttgaagttgttcctcaagaacccggaccagcagaagccgttcgaatattactttaaatattatcaactgaaagacgatgacttcaacttcaaaaactgggagcaaatcttggaatccgaagacattatctcagatgttccactctttcaacaggaatggatacaaccgaagatcaatgcactgcaccccggacaaacagcaatcctgttggccactgctaagctttcccacctaaaaacaatccaattatcaaccgtcttcgaatgcttcgtaacgtacgacgtagccacaactggtcaagattcctgccccggtcttcaactgtttgtgggactggttgaagtgaaacgaaccgatttatacagcgtagatttagcagttgtcttcaatggacgagatactttcaaagatctgctcgcaataacggccacttcggagtacttggccctggaacttacattcgaaactgtaccgaaacgcggcttccatcgattttgcatcgagacactgaagtttagattgattaatcatggctgtgctgctgaggagctgcatcaagaggaacttcccaatatactctattatgacgataacggatactggcgttcgatgctgataagattagacgagctaaaaccgacgcgacaaaagatgaagatttactgcacataccctccttgcgttcattcactggacatctaaaatatgacaaatcaccggtgctacattagaattcctggagatagacatcgtttgttgatacagccacccagtgcatactttttgtaccgtaactttcggaaggtttggtatcggaataaaagattttgggaggattgagcttcatcgacacaaaacaatttgttggcaaagttgaaataatagtggaataatattagtaattcgatattggctctaagagatataagcactattaaacgcacggtctatcttaatatatttaaaaatcgatcactttgaatcggttttaaacatagaaacaaaccgatgtaaaggaatactggtcgcattaagtctacgtatatggttaataagcaccgtattattgcgcgctacttgatgtccttggccagtaatgtcgtattttgcttatcggatattctacgagtgagggtgagaaatgtcggtctcgtaaagcgagcctcgactcgccgcgcaaatcaaatggagggtcacttc

SEQ ID NO: 1248 - DNA, 960 bp, Aedes aegypti
gctgtccgacgtgagcgtgtcgatttcccgcaaccaaaacgtgtgcgttttgttgtttattttcacgcgtatcgcaacatcttagcggctttttccgcacagagatcgtagtagactgtgactgattgtgcctaaccaggacgcccacgcggtttgtgagttgagtcctttcttggatcgtgagctcatcggaagtttcgttgaatcgtggaacgttacaactgcagaagcagcagcagcacagccaatatggacgatacgatcgacgaggaagtgatctctgccggcgctacaattaccgtggagtttagcggtggcgcggagacgctgttcggaggagtcaaggaacatgtggtcccgctggacgggtccaaaattgtgctactcgaagaaatgctccggtggcttcgggacaacctcctcacaggcgatcctaacctattcctgcaggaaaataccgtacgaccgggcatcctggtcatgatcaacgacaccgactgggatctaatgggtgaaaccgactacattctgcaaccgggtgaccatatcctgttcatttccacccttcacggaggttagacgctgcccgcaggagttgggatctgtgatacaaaacaattttcggtatagaacagttgaatttgtcctttgtgtattagagcaaatggaaggaaggaggtttcctttcctgcttgttgcttggctagtgtattaacaaaaataaacaatgaaatctgagaggtttgaaggttcgacttggcgatcctcgttcatggtggatcgttctagttgcgtatgcgaaaatttttgtttgtatggacgaatgtcagaagatgaaaaaaatcaacctaattaagcacgtcagtactttttgtataaaatgaatgatgaaaaaacaatacaaaaaatgtaaaaaaagagaaacaaaacaaaaaataaactaatgcaagtgttaatcgt

SEQ ID NO: 1249 - DNA, 2206 bp, Aedes aegypti
acttataattttcggtaaatagcattttcgatcatcattgcggtacaacactgcgtctttgctaaccgcatcagtgccatctattttttcaacgtacttacgcaacaatatgtcagaatgatgtcggttagttgttttgattgaaccgcgatcagttcggttaaaaatagtggaacagaaaatcgtaaattttcgtaaaataaatccatcaaaatgtctctaaccgatgaaattgtgcgcttcaagctgtgggctactaaaatgggatgtccactggaaaagattccttccgacgattcgttaaaaaaatgcattcgcggcaagcagagtatccttttccagcagatcgtgtccggaatacttccgaagcaggagatagccacaatgcgaaacaacgtcctggcagccaaactcaagcaatatcaagccctaggcggcgtgattgcgaaatcgaaaatgttccaaatgcccgatgagctacaacgatatgagaaagtggagaggttgaaagacaaatgtgcagaaacaagaaccaggattctgagatcgaaggcaacgatggaagcgctaacggataaaatcaatgaaaaaaatatccagaaggttcaaaccaacacgaagctgggtgaaactacagataagcttgctttctacaaagcaatggataattctctgctaaaggaatccgagaaagagattgaaatcaaacatttaattgaacgatcaatgccggttagagcatcggagtcgcccaaaatcaaatctgacgccgaggaagctgttcaaacatgcttgaaatatttggaggatttttactcaaagttttctgagctaaaacaggaaggcagcaaacaagcacagcagaagctttggtctaacattagatcagcactgaaaggcattcccaatcatcttctgtggagcgtcgtaatggaaatgaaagaaagacaacttgcggaaatatcacaggccgattcgcagcaaaatgatcacgagaaggataacgctttatccgcacaggatgtgctgcagatcaacatggctaaactttgcggctctcacgtcaatttgttcattgacgtggttgcaatgaaaagagcaattcaaatgatgaaggatgactacctggcaaagtatactccattcgcgcaaatgttggaaactaaaatgaatctattgaatatgatggatgacgaagctgaagaaatgctggaagattacatgtttcagtctacatccaaggattacaatcagggacagcttgatttcctaagcaaagaaatcgagcgtaagaaacaagaaatcaaaattcaatcttccaaactggaaaatcatgaacaacttctggctcagttaagagatatttatggagaaattgatacttgctccgagcgaatacaagaggaaattcaacaactaaatcaaattaaggaaaaaatctcatatttcaaaagatatagtcgttacacggttcacaatatgcgacagaagacaacgaatctgtccataaacatgcctgatcaaacaatcaatttaacaaagcttgaaggcaacactctcacaaacattcctgcgtatgccccagcaaatctaccgccgtacagcaccgaattatcaacatttgcggaaatcccattccacaagttctacaggcacaacaaatcattcctgctctcgctcaaaacgaacatttgcctgtccgttggaaacgattccagtgcgttgatgtctttcctaccgaactgcttttcatccgccgagacttccatccaccaaatgcggtctttgatcaagttcgacgaattcattcgcacatttgtcctggacttgaaacctgaattagacacggttgtagtggacgaggcgtactatcatcagttgtggaaagccaaccatgaaaagatatgccaacatctggacgagattgaagcaattgcgaccaatacacagcaagtgattgagaagggaagagtttactacaacttcgtgctggcaaatcctttgcgaaagtacgttccacctaagaagctgttcaacgggcggaactatcgcgaatatgagaatgaatatttgatgtactatcggatgattcatgggccgattgcggggcaatgatacagtgttaagaagaatgatgaattgtcaaataaaaatgttttttgctatcacaaatatttgataaactttctttgttttccctcatttc

SEQ ID NO: 1250 - DNA, 619 bp, Aedes aegypti
gtttgtggttctgatttgtgcatcaaagatccggatctacttttttttgtatttaagtggtaaaagttttgtatttgagagaatttcaacaacccatggccttttagaaatacctcatgaggagtggatgcatatgagacggtaccaatcctatctccggaagcgatttgatgtctatgagatacctgattcaaagatttccaaaaactgtcgaccttataaagcgacatttctgttcaatcttgaaattcacgatttcctcctcaaaaacaagcaggtggagcacaagctttgcctggtgcttcttaatggtttttcattgagggtagttatcaacattgtgcgtgaaagccgtagctcaactaaatcctctctgaaatggatggtgtcctggaaaggcaaaaacggccaacgatggataacgctccagatgtcggatgaagaaatgcgttggacatctttcggggatctttgtttggagtgtccattggcatggtaacactcatttggatgtgaatacatagaaataaataatttcataaatatgaagcttgaaagttgaaaacgaataatgtgccattatgaaaaaaacaataaaaacaggaaaaatttgagctta

SEQ ID NO: 1251 - DNA, 808 bp, Aedes aegypti
aagatcagtttgaaaaacacaagttcaaaacatttgcttcgttagtgcagtttcaaattaaatcaatattttacaataatcaattcaatataaaattaattagacattagtttccatacaacaaaatgagttacgaatcagacgaagtcgacgaggatattcgcactctgatttcggaatctgtggacctagccgatgaactgttcggagtgatcgtgcaggaggagctgagcaaaacgaaaaccaccatcctgaaggagttggaatccgaagtggaaagctacgctcgacagattggccagtacactaccagattgcaacggctggaattgctcgagcagggtatgctacatcgtctgaacaactgcagtgcactggcgaaggaatttgaccagctaacggatttgtaccaggctaaagtaagccagctgagagacctattggaccacagcatcacattcgagttctccaaattgctcgccaaggatgtgttccagaagatgtacggatttaaggatgaactcgatcaactggaggaaaagctgggtgaaagcacggatctgatcaacaaggaggacaatcaggagatcgtgcaaacgttgagccacctgaagagaaaaacgtccaaaatgatgcaagatatggacaatttgctgggattgaacagtatgcacaagctgacggtgatgggattttcgaacaaaatttattacgacgatcagaagagtcaaggggcatgataaattttatatagaaatataacgatattatctataagggaaataaataatttaagattgaatagctt

SEQ ID NO: 1252 - DNA, 1892 bp, Aedes aegypti
atctcagagtatgcgagatatgtaacaattttcgatgaattattgggttaacttttgtaaaaatctgtggattgattctttaagtctttaagagctcatgtgtaaattactgtaagtgttttgaagaagttcataaaaatattattagaacaaacactgaagaagttttggtgatctaagagaaattcttgtattcttggagtagttgttggtcagcgaacaccatgacaattttggaggaatccttggatgcatttcataaataatctccagagaaattcctcaggagagaaatcatgaaaataaagtcatgtaacaaaaattaaaaaaaaagccgaaagaaaaattgctagtacctctgaaaggatctcgataagaatctcgagtatttgacgggacataaaaggaaagaatccaccactaagaaacaaaagtttaaaatattttttttttcgattggactctggctgaaattttgaaaagcctcaaaagccacaagtaggagaaaccaaatttttaagtaactaatttcgaacaaaatttgcctaagctattgtccaatcaaattactttcctctattagcaaactttttgaaaaagtaatattgaacagatggttggttcatcttgaagaaaatttattttttgtgaatgaacaggaacaaaatgttaccaaattaggaaaccaatgtttcccgacagagaacacctagaggtaagaaatgaatgtatatcatactaatgaacgttttaaaataaaaaaataaataattgagattcatcagccatacttgtagaatgtagattaacacttatccttatggtccaaaacctcaaatgaatgccgagaattcctctggggattctcaatgaatagtagaatttatgctgaaggaactggtggaagttatcttaaagaattcttggaagtaaactaaactaaaataattgcataactctatagtcgtctacaaataaggaaagcagtgtgaggatcggggttaactggccaatgatagatcgtcagtcgatggggcagcaattcaaccttcaggaatcgtccaagtagttaatggatcagttctcaaccaagaaatagaaccaactcgcgttttggatttcattttctctcctgtgaaagtaaaaaaaagggtagatgtccctagattttcatcgaaaaactataatatttattcaaaaacggtgaggtcgctcgttgcctgataaaagcctgggcacgcccatgtttgctgctgaccatcggtcaagcaattatattctgtgtgcaccatcagcaaactgattgatctcgttagtcagtctgccgttgacttcccgttcaatcacagtaagcaaaatgcacagtaagcgtacgattctagtttggacggtggccattttggctacggtaggagcgatcccagcaggctttgccgatgtatccgatcaaatttcggccacgatcgaggcggagaaaaatgtcggagtgttcactgttgggaatcaacttccgggtccaagtggcaaagtgggtcaacaactggtctacaccctcggacaacgggtcgtaggtgatcgtcttgtgtcgaccaaatcggatagcaaacagtggccaacgctgcaggacgttacgctaagcttggcctatccacagtccggcgttggagctgtcgtgacttacgtccaggtgatcgtcaaacagagcagcaatcttggcaaagggtacgtcgtgtccggaggaatcggtcagcgattcatccatttgaacatcgaagcctacagtaccaattacttcacttacactgttcaaatctttggattgtaaactgtattagcgataagcacttacctcgtaataaaatcccggattatatccggcgccaccgaacagg

SEQ ID NO: 1253 - DNA, 416 bp, Aedes aegypti
acatcagtacccaatcatttgagagtttagacagttcttcactaactaaaatgcattcattaaaattggtatcggtgtggttgatagtacttctatcagctatattggctctagcacaaggctttccacaagtagagcagcggcaaaggtttacggacggaaacgacaaactggtacttcctgaagagcagagtttggagtcgcaacgaagccattggcgatcgaaacgcacactatgtaccggaaagttcagtaaaatacttattcaaccttgtttcttccactgtcaaacgtttggaatgaagggaaagtgtagcgaagacagaaagtgcaactgtgttccattctaataaatgtaaactaatttatataagatttgtattaaataaaatttttcagataatgttagaaaggct

SEQ ID NO: 1254 - DNA, 2343 bp, Aedes aegypti
cgctgttatgtaaataagttgtatgtcaattgcagcacaaacaaaacaaggcaaaattcgaatttcgtgcgcagttcgtatcagttatcatggatgcatatttaaaattggaatggtccaagaacaaccgacgcagcgaacagcggctgctggaatatttcgccattgacttctcccaatacgaggaggacatattcaacctgcacatcaatgaaactgacacggtgcaccagttaggggacacctttatggagaacagcgatgaccacgaaacggtgctgaattatccaattgatccccggactggacgagaggtacggcagctggaaattgacacgaccaaggctgagggcttgtacgatgacttccctagcgggtcaatgctgagccaggcagatcatcagcactgtttgaaggttttgaacaggatcaacatgaggctgggattcgaaagtgcggaagactgcaaagccctgagcaagtatcacgcccttatgaagaaagtggacaacgagcggatgttgttcgagagttttgtcaaaaactatttcaacagcaacttggtatgcaggaaaagctcgatcgacaaggagctggatgacctggttgtggccatttggaaaggaaaagttggaagaatattgactgattttgcgaacaagaggtacatgctgtccacggctgttatgtggcttaactataagcagcatgagcataatgtgcgatttgaaccagtttccgaagatgtggtagaatttggagttgtgaagaacatttataccgagtctctattggcgtgtaatactttgaggcggaatcaacgcattttggatgcatttttcgaggaccagcaccgatcgcttccgatggacgatagcgtccaggtgaacacagtgctgcaacaggatgaagacatccgatttgtcattaactcgggaacgctttgctacctgctcaattgcgtaagcaacatggaagagcaatggatggttccttttcggatcgaaatgattggaggtcgtaacgtgattttcattgacaaaaaactccaaccaatcaagatgcccacacacgataggaacatgaaagcgcacaagtatttggtacgtagcttcacgtcgattgttaagaaagagaatcctcataatgttaatcgggaagctgacgagaaagattcccaacgcattaacagtattgagtataaagcaattggttttgatgagtatctgaggtcagttgccgaaaaatcagaactcaagccatacccgaatagaaattcttgtcttcagctgtggacattgcaggaaggcgacgaccagtatagatttcttatcagattccgtatggactgctacgaatccttgcgaaaaattaaattctacatcaacatttcggttaaactggaatatcaaaccgagtttggcgccgaacaaatgaccaagagtgaactcattcatgaatgggcccggcaatatctccgaccgaactcgaaaaccctccgattgcggattaacgcggttacccatgtcatcatatctcaccactatctcgagctgaaggacatagaagaagagttgaagcgctcgtacgatatcgaaccagccaatctatttacaaatctgtggcaaaccttgaaaattcttctgaatttccctcctggggatcacattttacagcacgacatgaaaaacaaagacatcgtaaatgtactatctaacgataactcccccaatccaaccagttcttccatcaatttggtggatcaatactcaaacgtcgaatacgatcgcccggccgtcgaatcgtacgattggatcccaattgataaatctgtgataactcaaatgcatcgcgaaaatacgctactcccgtgcactttcccccactggatctccgtcaagcgcatcactccccgggggaaactcaaacacagtcgaccccctcctacgcaacaacctgttcccgatcaaaaacccaaaaagaagaaatccaggggaaaccgcgttcgtcgaaagctcaaggaacgcgaagccaaaaagcagcaacggaagcaggctggctttgtcgaagaaatgcagcaatcgttgaatcaattcgctccgtacgaggggccgtcgcgaaacagcgaaccatcatccatggcagccaagaaggatccgagcaaaatgagcaatagtctgcgcgccatggagcgagatccgttcgattaccattcatacgtgaagcaagcccagaaagacgaccaataaactgaaaacgatataggtaatcttgaaatgtaattcaataatctatcacatcatttgcttgtggcttacagtattgcctattcactaagcagac

SEQ ID NO: 1255 - DNA, 1070 bp, Aedes aegypti
aatgtacgctactgatgtacattttgcaaacattatgcatcaacgccggtgatacaaaactctagtgttttttttttggttcgctataggtagaaatgaatacgctgaaatctaaaccactagtagcgccaaagatttggaagcgggatgaaattctcacatttttagatatctttgaatcaaccttccacgcttcggttgaggaacccttcgaatcagaagaggacatgtggaaatgtgtggcagataaattgttggagcagggcatatcagcctccgttcaacaatgcataaataagtggaactttttgtacaaaacatacatcagcaatcagaatcgacagggtgttttctacgcgaaggtgaagcgaattgttgaattctcacaggaactcaacgagcaacaggaatcggtggaaacggtagccgatgagcaagtagtagaatacgactcggaagcattcatcaaacaggagaagctatctcacgatgctgaaagggaagaaatagaagaccatttgaatgagcatgaagaaaaccacgatcatattgaggagatcgtcactagtcacgaagaaacgttggaagaaaatactgcattggacttacatgatgttcaacctgagtctcagtgtgatagtgtagcagaaatgacttatgctgaaacacctgcaaagaaaataaaattatcagacgatgtggataccgttactggtaattctagtcagcaatcacccaaacattttaccgaagaaaatacaaatttacgggatattcttcaaacgatactcggtaaaataaatgcaattcaagatgagcaaatccggcaagggcaccgaattgctgatatagaaaaacgtcaagacgagcataaatccatattattggatataaagaagcacattggattcaagtaattttgcattgtatcttgttttgtaattcctctttatatgaaggtttttttcaatgtatgttctagtacatcaaataaactatattgtacctgtgtctaggtgttttttgtatgaatagtattttacgcaataaaccaatgtatttaacaaaac

SEQ ID NO: 1256 - DNA, 834 bp, Aedes aegypti
atgatgcgtgctatttttcttactctatgttcatccatttgttccgggtttcctattgaacttgaaaatcgggcagatctcattttaaactacaaaaacctcaccgaatttgacgtttcttcggccacattgacggaagtcatatatctttcactgcagggaaacaacctcatcacgtttcctcgctacatttaccacaatctgccggaagtggaaaggataaagctaacggacaatccacgaatcactttcccatcggatggatctccttttttgatatcgtggagccttattgaactggaactcgaaagctgcgggatacaagagatatacaatggatcactcagctgcctgagcaagatggaggagataaacatgggaagcaatctgatcaaacaaatcgacaaaaatgccttccgggagaaccataacttgcgcaaaattgttctcagcaacaacaatttagcaacggtcccgatcaacatgttgaagggtctggagagaatgaaggaaatcgatttaagttacaacaggaaccttgctgcacgtttgaatcgcccgtttctgatgagcaatactctggaaattttgaaatgcagctactgcgggttcagagaaacgacagagattacattcgcgtacttgccaaacctcagagaactacgcctggaaggcaacctgcttctgcgggtcccggtcctcttgatgccaaacattgtagtaatcggaaaagatccggacagtgtaatgacgaattgtagaatactagcgtctcgtgtttcgaaggaccacatgatgaacgacgaatttatttgcgcacttctgtttttgtag

SEQ ID NO: 1257 - DNA, 1896 bp, Aedes aegypti
cgacaacatgaaaacataaaggaaaatcgattttccaacccacgtacagaaagagatagtatcgcaatgctttcattttgcagtgaactaatgtgattctcatcacgtacgtagatattggatttttccggatctactgttgagatcatagtgtaaatatgtaaaaatcgcagacaaatgatatcacacgaagttaactattttatagatagtgaaaaacggtttaaggaccgagaaaagcattccaaaatgaccatgaaatctagtttcgatttcgaagagcatatggagaaatacgacttggagaattcagcgatccacagaaaacttcaaagcaaagtggaagcgctgaagatcatgcgaaatgaactggaaaagtaccgatccgaaagggatcagttcaagctgatggccgaaacacttcaaatgcgatattcagccatgaaaagtagtctcaactcgccggagttccaagccgcaggctttggtcatagttccgccgttagtctattggttaatcaaactcgagaacgcaacatttctttaagtactgaagtggaagccttgcgacagcgtgttcatgaactagagggcgacatagacgtcctgcgaacaaaaaacttcgatcttcaagcagctttcaacaagatgaagtccacggaagaaacgaagctcagagatcgcaaaggtatcgtttgggacgaggaaaagtccaagctgatagcgcaaatggaaactctgaagaaaaagaatgctcaactgcagtacgatgttcgatcgttgctggacgaaaaggaggacgtagttatggaacgggacgcctacaagtgtaaagcccacaggctgaaccacgagcttagtgtgatgctcaagggtgaccaatcgcagcagaagattgtggatgttgatggactgattttggagaacaagtaccagcaggaaaagattacgaatttggaaaatgaattggaactgtcccgacagtcggccaccaagtacaagaacatgcttgacaccaaacggaaaaagggaatcatcaagcttggcactaacaacaatcagagggtcatgtctcactcacaagtgaaagatctactcgaacgcggaaccgttgaggagcttcccctcaaagctgccaccatatcggagctgaagtcactctgcctagccctactggacaacgtcaacgacaagagcttggcgttatcacaccagaagaaaaccaacaaacttttagctgcaaagattaccgaactggagcaacggatccttgctctaacgggaactaatgaaatcgcacccacatccagcctttcaccgtctcaaattctcctgaacggatacgcttcgtcaacggtcgatttggatcttagcgaagaaatcaagcagctaaagattaaaaatcattctgaactcagtagtgataacagcgcaaatggagtggggcctaatggacgtactgagggaaccagttccaatacatctcaaggcttaccaacggaactgctttcgtccgaatcgaacaagagtctcccgagctgttcggagattggtgaacatgattatggtcgtgaatcatcttcggatatgacttccaatgcagacgaaggcatcctattggaaccctacataagagcgagccgcagtggatcgacggacagcaaacttccggagctgccaccagagattgctgaacttgtgcggcaattatcgaacagtatggatgacagtgctaattgaaaacggacggatttgattgacacttcttggtggcattgagacttcattcacacagttttcgaattatgtcttgggttgcccggcgatgatggagaatcaattcttgaattgcagaagaatcgaattgtcctaagatgcttgttatctctgagagaa

SEQ ID NO: 1258 - DNA, 5585 bp, Aedes aegypti
atgttcgacgtggaaacaatcaatcgttcttcaggaaaagttcaatcaatcgttttgaaacatctgaaacaacgatcaaaactattttcaatcaaacaacaagcagaaacaattctcctgtttgtgttgaactcgcgctcatttctactagaacgatggaatgatcttctagatattattatccccgtactaccatttctgcaaacggctggcataataaaatcgcaatcgacactatcacgtgctatatttgccctactccatccggactctcaactctcagcgactgacttactccgaggaaatctacgctacctttttcaggacgacgccgatattcgtgaggaagccctaactcgagtgctgttcctcatgagcgttgcaccgaacgcacatcagtattcacctaacatagagcatatccgtgacacattgtccaatgccatttgcttgacgaaatccaagtatgacgttggcaagcacctttctacggatgtgtttgaaataagtgccgtcaagcccctgttggatacactggtgcaggaaaattccgatcctgggatcagacggagtgccctcgtccagctgaacgccatggctgaagatcccgttctttgcgagatcatccataaagctaacggatgggcgtttatattgcaggtgttggacaatgctttgcgcgagcagcacttcctcgactacccggacagtgcggtaccagcagttggtgttttgacgaagctttgctttgccattcctgagtttcggagatttttggcggacgatgtaaacgtatactatttgattgtaagatcattgttgagttttcatcatttgccaatttttaaaccggattgctgttcactcttgttcctgttgctgttcagtgaatacactttagggtgtgggaaaaccgtttcgctcccggcgatatgtaagaactacaaaattccgtttatttgcgagtaccactggaagtatagcccattcaacgagttgagctacttagaagagattttcatcgatgaagagcgggacgatcagcaatttactgcagaaaggaacaccattttacgattaagcagaccatgtggcatggaatgtgcaaccactcgaatgcaacaacaggacattaatgatttagaaagcatgaatcacaccgcggaaaacatggtctatttggagagttatcgtcaggtcgcttggcagtttttacgattatcgttcgcaagtcaatggttcgatgcatttgaaaatattatgataaatgctaaacgatctcggcaaacacttgactctggcaaagaagatggcgctcttgtggactataatgtgctgccccctcacttggtgtcacctaagcagaatgaggatgaggatggagttattgaactggatgatggctccttggaatttgatcgagtccttcacctcacaaagcaagacttgaatatgattcgaacatctcaaacagatgagatttttcgcaacagtttgaaagctatagcgacagcggtgtcccacgccgaagtgtccataggattgtcaggattagaaagtaatctaatattgccaatgagagagcaaattttacacaactcaatcgtaaagcatctaaaaaagttcattctaactccgcccaacactccagccgatgaacagctactcatcgatgtgctcagtttactgggagatttgatacaaattggatacgagaacgtattggtctggatagtgactctgttgtttgaacaaacgagcatttttattcaactgctcaaatcggaaacgtgttccgaagaactgttcatgaaaaacgtagacttcatccaaattgtcctgcaagcggctcttgcttgcgataacccaaatgtagcaagcctgcttatcaacgaagaaggttttcaaatgaaggtcaaacgggaacacaatttcaacttgttgaacagacttttggaaatcataacgaaccgtttggataatgacctacaaaagtgccacatcggaaatgtcctctcgttgatcagtttggcgagggtgatagcacttagtgaactgatcgaattcgagaacaaatttctcaaccatgtcatcaacaaactgtgttcgtacattgcgcgcatcggaatgcttacctattcgggttcaacgataataaagaattgcctgatggtcatatctttgctgttagaccaaatgagagaagttcacctgaaatcgaaacacttcaaggtgatcgcatcacagtgcagccatactagtatactgattcgatcgtgtgcctggaatgtgcttgcaaaaatgtcaaaatctttgtccggagcgcactcgataattaaggagtgtatctatctacccggtggaatgcacgcttgttgcatcaaaacgattctggatccggaagaagccagtctggttaaggaatctgctgctggattgctcataaatttactatcacacaagggggacaaagatgaacctctgcacaagtatgtaattccgtgtgacaaagtgtctagcagtgtgaaagatgtagatgccattgaaacacttttcacggtgttaagaaagcataggtttttcgagcaatctctggaatcccttcaaagcttcaccacccgtgatgaagtagaaattggagaactcgatggaattcaggtggtgacttgcgacgtagtcaaaagctacagcatgatattctcttgtttgatcgacctggcaccgggtttaaccgaacatctaatcgagaagtgctgcttgcagcgtttaatgaactgcgtttcaaatgtgcctttgcatccgggaaaatccgctctgttgatggtatcggaagtgtgcaatttgttaatgcgatgtctgacgtacaaagaggacgatatatgtgagctgatatctccctatcaggctgttattggcgggataatttatctactgaatggcgacttgtatcaaagttacgacgagcgtttacttcgccaggtcaccggtaatattatgcagcttttgaacgtactggtcgccaataagatcggtaatcaacttattaccggtgtactgtcggagttgaaactggagccacttctcagattgatcatgaaagcaatttcggaccacaaacagaaagaataccaaattgcatgcctccggtttctaacgttgctaacactgttgtcggataacacttcggtttgcgatttccaatcattcctcaatctcatggaaactaccccactccatcaagcgtcaaccacgtctacagaaaacttacctacaaaatccggaccgaagatgcgctacttgaccgataatttctgcatagacgacgacgatcgagaaaatcaggaccccaacgggttgaaaaagcgccaaacactgccaatcaaacagaacgaaaatgaaaccatgcaaacaggaagcgaatacatgttttctgcactgatggaacagtttcggattgcatgtttaaaagataaacccgaaaatggcgcactggtttccactctccaaaaaagaacactcttctccgcaattcaggtgatgctgcggcaatcggaaaaggctaggaaagtagcccgcacgagcaagtttctggaaatgcttctcgaccgcatggaagctatctacagtggaattggcatcaactatcagacttttgtaaagaagcatggagaagggcgaaaagctccaatcgtggaggagctcacgttcattgcggggattctatcggcgtggttcatccaggacattctagtacatcaggccaacatcaactatatatgtcgattgttcctgcaatattggccgtggatcagtaacaaccgtgatttggagatagcgttcatgaaagccttagtgtgccttaccgaaaattcgatcgtagtttgtaaaagtctgtgcataccgcacgcagcacatccccattccatattgaagcttacaatagccacggtaacgggtgaaacaggtaaagtaaaaggaccgaaagctgaactgacgttgcttcgcctttgcttgagagttctgatgaactgttgttcctgccatgaaggacgtgtgatgatcaccaagtttaacgtgctggacaatgtgagcaaattgcatccggttgttacaaaactgcaaaagccatggatcacggtgactaggctatggttggagttctgggaactctacagtcgacacaacgatgttagcgaagtcaaacatctcacagtgcttggagcgctcattcgtaagtcaacgccagagttacgtcgcttcgcgctggaaattatgcgtaacatgtcattcgttagcaacaatcgaccggcactgcttgcttctcaggactacatgtactcacttagagacgtcctggacggcacggatccggccgagcagttacttgtggtaagttctatatggaaaataattgctaacaatttcaaaggcaaagctgccatcaaaagcagcccactgccgaggcgattgaacgctttgctcaggcagcgatctttgttggaacgctgcgaagatgatgatctcttcaatgtgctcacggtagtggtgagcctcttaaatgcataacaattagaattaggatcgatttaaaatttattcacgcttttttgttaaaataatacaactgtacagctagatgaattctaaaaaaaaatgctttttgaacgtttgcgaaagaactatcctaagccttgagttatcctcgaattatgttgtaagcaacgaacagcatcgtcatgaaaatgttaatagtgataatggcacccttgttcgggtctacagttgtggtgctgatgcctgcacttgtgcaatcttcaatgttctcgaacagtcgaatgtaattctgtactgcatgacccagctctgcatgctgtggagagaccaatcccaacgctgaatcctcgaacagtaagttcttgacacctccaaagatgttgtacattcggaaatcgggatcattttgcaaatagatatccaaggagctaagggcgttgattataccagctgtcttggacgactgacgtcggacaactatttccccatcgacaatcgtagtaagataacattcttcatctacctggaatcctggataggctgcaagtgatccatttctgcaaagaactcgatagtcgtttggattaatgttcaaagcccgggcatgttccgccaagttttgaacctcgacgatcgctacttcaccctgcgtattaagacaattcagtgcaccacgggttccatagaacgggttattgacattggcagcacaattaatattcctttccacagtcgcgtcgatatcagccttgccctgaacctcagatggttggtcttccacttcatctggcaaagcagttgaatcttcttctccatcatcattgccactgtccctggatgccaatggtactggatcttggggtcgtactggcacattgcacaacgaacaaagcgattcaggattttcccctcgaggatcatgcaaactatcccgagaacctggagcacacgactcgctgaagaaatctcccaacagacgaccgtaatcacattcgtgctgatcaaaaatgcctcgagtttttcccacattt

SEQ ID NO: 1259 - DNA, 1424 bp, Aedes aegypti
gagcttgtttacagtcagtcagtgaaaaatttcaattaatcatagaccatcgcagcaagccatgtaaattggtgacgttcgttttcttcaataaaagtgcatcgaaacagcagtgaaagacctcggataaacgcaaatatgccaaaccaaggcaatggaggatccgcgacttcgctcgagtacaacggaagctcgacgagcgatcggaagcaatttctcgtgaacaatgagttcatgtccgatgtggtgttcctcgtaggcgagaagaaggaacgaatccatgcccacaaactttttctgattgcgagttcggagtacttttacgccatgttcaatggaaacttcaaggaatccagcgagagtgagatcgtgctggaggacattgagccaaagattttcctggagattttacgattcgtgtattgcggcaagatcgacctaaacttccagaacatccacgagatttacatccattcgaggaagtacatgttgatggagctgctgtccatggcatcgaacttcttggagaagagtattgaaccggagaatgtgctgaaaatcttcacgcaaaatcggttctacggatttcagtttgtcgacgaaaagtgcttgacattgatcagaacgaatcccttgttctatttcaatcacgaggacttttcgttgatcgatcgcgaatcgctgtgtttgatttttagctcaaagaaaatcaactgcacggacgaccaactcatgggggcgttggacatctgggaaaaaggtcacgaaacggagaaagtggatgagttgaaagcgatcatcaagaattccaaacgatcgtacgattgctacaagctacggctctttggtccatcttcgggatccgagccgaacgatttcggtttctcgatcgtttccgagacgaacgtcaacttgtacggcatcggggtgtatctcaagtccacggcaaaagtgatcacgatcgaaatgaaaatcttccagaatgacctcgagatcgggagcgatctgttcgaatacgagaatgacaactttgtgaccgtggacgtggcgaatcttttcttcgaggaaatcgttctcaagccacatcaccggtataagatcgctctgaacataacgccaacggtggagccattcaccattcaaaacccgaaggttcatcacgatcggatcaaaatgtcgatcgctaatgtcatctacggacgctgtgatagttcgtactgtgcaatcgcccacatgcactgtagggaacaaaaactctcgggcaaagccatcgggtgaatcgacgaggatcgtcggcgtgagttagttaatggttatgtaggctcctaattgtgctagatgaaattattttcgttgaaaacgattttaggctatgtaggcgtgtacttagcagcgttcaaataaatcaagattggcaaaccctc

SEQ ID NO: 1260 - DNA, 1021 bp, Aedes aegypti
tgacaaaggtgtagttattgtaaaattttcctcccagttcccatcatggttgaacagctagatagtctaattattaaaaatgaaccattctatgccgttgaagagccagaccttctcaatggcataggtaacagcaacttttcgttgggggatagtgatctacgtacgctttgcctcaatagattaggactatgtgaggaaactgtggctctattggaagcccagcaaatcgatgtcgaatgcttgaagaaaatgcgatttgaagacgtagataccttgtttgatggtcgtcctctggggccaaagattcatttgagagaagcgcttatatcatggagaatagatattggtttaccgatgaagagcttgcgaatgatttcttaccgcaagcgatccgtagatcagcttgattccagaccgataaaatatcccaacaatggtagctgtgatccgatggggaatagttctatgatggttgaaacacacaaatatcacaaaccaacatctaatatttcttataagacttttgcatggcctatgacggtggaagttttaaaggatattctgaatagttgcaatgttgggagaatgattttacattcgggagagctgggaagtttggaaaagtccttccaaagtcagctgacggcgatagtgatcgattatcatatggagtttgacacaaaaattacagccatgcagctagaaaactatcagagatgcatcacgacgttgttccctcatgaaaataagaattcgtatcacattcctcgaggacctacaagacgaaatcccggcggctcattatactcaaggttcatcaatcaaaagattagcaaaaaagcactagctatcggcagtggactggggtccccttacaacatgtgaaccttaagctaaatgctttttatttagttgcttaccgtgtaagaaataatgcatgtatgagacgtttttcaacagttaagttaacatcctttattgtattcttgaaataaatatttatttgatggaaacactc

SEQ ID NO: 1261 - DNA, 6338 bp, Aedes aegypti
tttgtttttttttggttaatttttatttccgtttgcatcatttgtactaaaagtagatgtaaacattacattttcctttgaactagcaacactgttcgtctgcaacgtctgtcaagctgtaaaagtcgcaaaagtagaggcaaattgtccaagcattgaacgttaaaatttgtgtttagtttgaacaaattgccttaagcatttcaatatttataaatcgagaattgaaccaatgtgaattgatgatcaatagattgctgcataatttccaataatgggtgagacaaacggagatgttatacaatggaaaaagttgtggcaactgatatccggaattcactacgaaacgccgaatgccgtcgtccgggaccggctcatggacgtttccaaacagctcacagatggaattctgatgtatcgaaaggctgccaacgacaaacagtccgaagaacagttgaagaaagccatgaaggaacgtaaccagcagaagctgttggcttttgccaccaaattgtatcagtatttggacatagatgcattgcagtcgtggaacattctttgcttctatcttgttaacgaatatcgtggtcccgctaatgcattggcagattatctttccaccgagagctcgatgttgactttgctgagtgacatctggtcctattacagtttggaacgaatggttttactaaaggttgtcaaaaatctgctggagttctacaattcgggaaaccatccatactcgaaggaatataaagtcataatcgataagattggcatggccaatctgcgaaaatcgtacatcaatcagctggaaactttgatcaacgaatcgatgcccgggaagctgattccgggagatatgtttaacaaccaagcaaaaatggtatcatggtccgagcggaagttacgtgaaatgaatgagattttgcacataattttgatgatcatccataacgatggaattagcgtggaagacttctgccgtttgttcaagctattcaaagggcatgcattcggcaggcagcagcagtatctagactccactaacgaaaatcatggggatttggtgaagcgaatcacattcagcgagttggcgatcatctgcgaagcgttggatctgaccgagaagccagacaaaacagattgggctgaaggtgtcatcgaggcgctggacaacgagctggtcacgctacatcagttcccagagcatggtcctctgctgttgatgtggatgctattcaacttcaggatccctagccacttggaagacgacgatgtatccagtcgataccgtcagttcggatcgagagctatccagttgggagttttcgaatatcttcatgcgttggtcactcatcgaaccttcaaagatcacagctttgtttgccgcattacacggaaggcgatttacaaccagcttgcctttctttgtcagttgttcgattccgacggatcagtagctgatcatgcgaaagttatagatctcctcagtgaactgatcagcagtccctcaatcgcagcggacttttgcaaaaacgaactcaatcccattcgatctttgttcgatacatccctagaaaaattcccagtggattttaggcccttggctacaatcgcccacgctttggcttcagccggctccaactcctacaaattcatccacgggcttctggaaagtttaccagtctatagcgaggtgtacaatccggacaactacgagctgcgttcttcgcccacgaacgaggatgaatttgttctggcccatgattatgtaccgttccggaggattgggtttaaggttccacgcgggaccagcgtagttgtgctcgataagcgatcccacacgatggtgcactttagaacgaaattcaacttttacgacgcattgcaccacgagataaatgaattgctttcggatgctttggcttatacgcagcttaatgacgagaggattcaacgaatcatggcgggtatacgctatctagctgttgctgtaaaacgtgtcaatcagccacatgaaatcagctcggaaatggtccatcctacggagatggtcttcgatatccttctcaagttcaaggttgtccaaaatcccccagtcgaactgctagcagagtgtatcaacgtttgcgctgccctcgtgccgttatttgaaccggaaatctacgcgcgggtcataaatctaaacatacttccaactgtgaacaatgccaacctggactttaaggattacgccgctggaaccagtttcgaatctagtttgattggattctacttggtgaattgcgagaaaaatgccggaaagtatcgcatactgttggcttatctgaactttttgaaaacgtacaccaagctgggtaagagtaacatttttggggtagagctgcccggattgatattccttctgcgagaagtgtttccgcatgctcacacgtggaggtttgagaacgaagcagagcgacaaaaagtgtatgtgttgatcatgcaatatctttttgagatccttcagctaagtccggaaatgttaaagaatgactatcccagaacggtacttcagaatgtttgtgtgtacagcctgctggatctggacaacggattgaccctgttaaagtttgtcggtgttggcaatggatacttgcagtcgataatggaaaacgaaacaagttggatgatggcccaagagcaaagtatgaatcaactagtgcaactgtcgatgactattttgatgcagattctacgactcaaacggacagtgattgaagatgagaaaatgttatcaccgttagaatccgctatctatacgcaaccgaagcaacgagatacgctacgcatcattccggtagtcacgggatacatgaacaatatattcaataggagacttcccatattatcctgtagattgctcagacggttttctatcgaattcaaaatgtctttgctcgcatgtttggatatcgaaccggatcaaattcggttgatctttctgcaacgtttaagagatgatctggaaagtgataacctcaagatagcagtattggagttcgtggaagcgtgcattcacaagcaaccaggattgacggaagctttcttcaaagtccattatgataacgttgagcaaaggctatttcttggtgtgaaaccgggaaagaaaaagaacatcagtgatggcataccgacttatatggaagaatatctggaagcaatttccagtgacccgaagaagctggcaagtccgcttttgtcccgaatcatgtcattgtttcatgctctttggaagaacaacatgcaggtgttatgcaaagaactgctggaaaagaaaactttctggccaagtttgtgtaatcctttgtttgggaacatcagcgaaaatgttaaagcctacagtcagctattcaacatactaggaatagagctgttcaaaatcgatagcccacgtaaggttgatgagaatctgaagaaagtatacgaaaaatttctcgattatgacgtgttttcccgttgggttcgagctgttttcgatctaccgaaatccagtggagaaatatgcgatgatagttcctctttcgcatcgccagtaaccgatgagactcccgaatggctcagtcgtttacagtccttcaaagatttgatagttctgctgctaaggaaaaaagataccggtatcgtccttccggaccgcagcaaacgattcctagccgatcagtgtctaaacgttttgctagatcgtgcagagtatgcagaagatctccgcccgttcgttattcttgcagaactatatcttatagttctctcagactacgaacacaagtataccgataacactgagcaggacaacgaagttttgcagaagattcaaaatctgctcaacgctcttgccattaactataatgaacttcatggacgagcaaaggagtctgttctggcgattgccataaaggcagtagaattacaagccgatcagctaattgaacactcgtcagtcatctcgagcgttacccgatccgctgtcgaagtcgtctgccaagaagttcataacctagaagtgtcgacaaaggccgagataaaagctccaaatgctaagatcgcaactcgtggacacataccgctactgttggctctaaacttgctaaagaaactcattctcatttatgaagaaaacggaagctccgcagccaagtggcaatgttggttcattagaaataaagtgttcctgcgattgctcagcgtaacgaacgtaatgtcacagatgcactccaaacgcaagatcaccgaagaagtcttggaacttttagttgtgctggctaaaagtggatgctcgggcgagatgctacactgtgaaattggagattatctgtggttgaaactcttaccaccgaaggagctgctacaaaggccgtacacgatgtctaatgaagccgaaaacaagtggaaatcacaagattggtggccgatttacaccctaggtattgagttggtgcgggtactgttggcgcaacacaaataccgcttcctaaaggatgctttgttcttcgccggcatacacgaggaattcctcatcgattctttgctgttggccaagcaatcaatggagaccaaagcggtggcgttaattaaaggtaccctagagttgctggtagagctggtcaactacgaaaaggagtggagattggaacacggtcagagcttaatcaatttgatgagatgcgttcaagttctaatggatcatagtgttgcgttgctgtatcgtcccaaaattctcaaaagattagctgaaggcccatcggcagagctgtgtaacgaacaggacgaccccaatgccgttgatacctccgataagctggtcactgccatgaacaacgtaatcgagattgtcacactgtgtgccaagtgcctcttgcgattcagtccaaatttgttgaatctactttgtgacgttgatttcttccctgggcagtggtacccgttgatcgagattcagtttggagttccgaaaatgaattcggataactattcacagctcagctttggaactgtattaagagccgtgtgcatattcaccaaagttttaaatgtgcaacattatacgttccaagagcacccactcaatcaactgccagccggagaaactgattttgtggatggcacgtcaacgttgtctaacgcatcgttagctcgtctcaacaaatctgccataggtggcagtaatggtacaactcggcagtcgagccctcgtacaccattctccaagtcgctttctatgacatccgtctccagtttcacctcgacaaatgctattgccctctccaacgagcttcttacacatttggattcaaaactctgcatcagtggcttagaatttgtgcttaccttactcgcttcacaaagtttgcttgctttaaaagatactaacctatcgcaacgagagaaacaacttatcaaacgggagcttagcactgaattgctgattttccatgatttcgtaaagaagcgcatcctaaaggattcaaaggaaatccttactcgtaaaaagtatggatccgtacccatctacaatgatgatgaaaatgaaaccgacgataaaagcaacaccgagatcaccgtaaaatcggcgccgccaactgtcgtgccaaagaaaccggaccgcagtcattcgatgcgagtgaacgtggttttgaagcagcatttacaacaggcagcttcaacgccgctcagtccgattgctcactcttcgacgcggatggacccggctttgcataaaccgtcctcgtctactcctgcaaccgcaccgcgaggcatcttaaaaccacccaatgcaggatcggtcaaacgagtgatgtttgacgagggcttagagcatactaaaacttttgcctatgcaggcccagaagacgagcccatcttctatgaaccggaagattgcaagtacacgggattgtcgtacgtgaggatagtcgaggaggattacctacacctgttatcgaacctgttctcgatgatagctcaaagtgaaaattagttattttttgacaatgcaacaatgtttaaataatcatcaaaagggttaataaatttcttaatttgccaaatcggtatagtttattttatgtgaaagacaaaacggtattagccaatggtcacagattatattgcataggccaacatttgcgaaattgtttatcataaatcgatatcattcaaagttgtcacgttccaagatccgactctcaaatcgttgtcctttatacattgccccggatctgttgccataaaataaattcgtttggtggacctcgaccttttcctcaataggccctaaccagggttgcgctacctac

SEQ ID NO: 1262 - DNA, 1460 bp, Aedes aegypti
acttctcctatcgcaatgcgatcggtttaggcatttgttttcattcctacagccagtgtcatcaacctgttagtgctcaatttgataaaggcatatcatttccgatagttttttaacattttataatcggaattgcactactgttcattgttgcatcacatgtgaaagttacttcgactcgtcaataaaagaatttcacaaacgaaaaagatggctacggaacgggcaccactgctggaagataagagctattttcggcgattttgcgattacatgagccacgataccaaaggagtcgagattgcgacttacacggtatctggaatcctattcgtcgtagcgtataacaaaataagaccaattacgcgcttcagcaaagcatcggacatcccgaagcacttcgttcgagagcaaattccacagtacggtcgtgtgaccaagatcgaaccctcgatccagtccggccctctgctaatcgtgaaacatcgcccgccgctaaacatcgttttctggtccaacaaaacgctcccggtcaagattgccggggtggacctcaacgccaacggttattcgtggctgcaaacggttgtcctcaatcggcaggttacttttattccggtgaaaaccgataccggtaaagattatgccgaatgttgcgtgtacttcaacgagctgtcttcggacaaaaagtggctcaggaaggtcgatctaggccaggcgctgcttcagctgggatttgccaaattgagtacaccagtgccacgggtcaagttgaccagcaaggatccctttgagaaacaagtgcacgcgtacttccagaagttggcctacagcgagagtaaggccaaagatcgacgcattggactgtggcaacataccctaccaccgaaaatgctgcccgcgagattgtggcaatctatgtgggacaacttggctcaacgactatcaccacagtcacaccgtgttccggagctggtacgataaataagcatgatattacgtgcaatcatcaaaagtcatgcagacatcagtcctccgccaaacaagcgcaacaaatcatccgagaacgccacatttgctcggtcattttcttttatcgtaaaatgacaacttgttaccgatttgaaagtattttttttctgttatactataaagtgcctgaacggagagctcacgcgtgtttgtggggcacaatcaaaacttggaggcgtgtcaaatgggcgccgccattgtccgaataagtagtagattatcgttgagacgtcaactgatggaagtttaattgatggcgatagcaatgaatgaaaatatctttgttgtttttagtcttctatattgatttagtttgtttttaagatgaataaagtttaaaacagtttaagagaattgattctcgcctagaagcgggttttaaaaatttcggataaaacgcaagtataaataagctgatggaaaaaata

SEQ ID NO: 1263 - DNA, 795 bp, Aedes aegypti
atgacagtcgtgtcagtcccctgcatcaagcatctcgcgatctcgcgttggtgttttgagtgggtgccacccactgggtggacaagacttgtacttagtacgcgaatttctcgtaccgtagatctgaagagaaagcgcttgaatatcttatcgactaagatcgtctaatggtgtattccggtgccagaaataaaacaatttgattattgattcgtcataacaataactgccattcaaaatgtccaagccgtgtgcgattcaaaaacagattgagaactctaacgagataatagccgaccttcgcgagcggatacgaaagatggaacggcgcctgacagatccccagatgccggaggaacgccgcaaagagatcgaaaccgaaataacggagatcaagaaaatgttggaaacaaacgaggaaatgctgcacaaactgcatcgagaaaactccaaatcttttgccgttgcggcttgcctgttttttgtctgttttctagtttacggaatttatgtattaattgtaggatcgtagcattgaacgaatatattactagagatttaattgtgaaactcaaacatggattcttttagcaattcgttaaggggaactttcaagaatttctctacatgtttcttcaggattttctctacagattctatctgaataccttctgaaatgtctctagaagtgcatccatttttttccggtcattcatcctcaaatatctgcaagctttcctccatgagtttccaagagccttcatagatccaaaaaattctgtacgaattcatata

SEQ ID NO: 1264 - DNA, 1132 bp, Aedes aegypti
ttttgttttcatttttgctgttcaaaaaactcggctcggcagttgatggccaacaaaaccgtggaaagcgtgaaaagtaaacgatttcgtatgcatcgacgtgtgccagaatttctagtgtgattagtttatgtgaacagccgaaatgggtgataaacatgtaccaacgttggacatcgagataaagctagatgttaacaccgaagaatccagctcgaaagcgttgcaaacaatcatacaggtgctgttgttccagcggagccaaatcccattttgctacgaagtgttccaagccatagtgaaaaaattgaagaaagaattggccgaaattgattcatccaaatggaaaaactatcaattgacaaaacagcgcgaaattgccttcaatttgctgtgtgatatacaaacccttttcagagaagtaacggaaattgcaaaacgtagtgatcacgatattcgcgccatggtcttgttcggatcgactctctacacggcaaaggaagcattcatcatcaaaattcccaaggcgaaccggaaacactatccccagcatcaccgccagcgattggaatccgccttgaaactcctaacgaggcaactgatactgtcggaagaactacgtccttcggggcgtttcgtggggcccaccaacacattcatgctgctgggaatgtcttccacgtgggacccggagaaaatctcgcggaccgtcgagtacagatcaataaatggctaccagttgccgattagctgccagaagtatgtgattaacgtaaccgtccagggggccagtgaggatgaattggcctgctgtaggcaaatggatgtgttcagcgatgcactgcaagtgctaacgatcgacgatgacgctaaggaagtccctacgaaaccccatggtcgtcgcaacgaattggtcaaaaacgatattatgtggtaccaagtgggaaggagtttgaaaggatttaatgatgtgctcattaaagggaaatctatctgggatggagaattgtgaagtgttgcgtccgtagggcgctaatgaactgacagtgttgctgagggcggcaacaaaaaatagaatctaaaaatgcgctttaagaaaataaattcaaattatgcttctaatgtaacattc

SEQ ID NO: 1265 - DNA, 1298 bp, Aedes aegypti
gactctggtgcagacttccagtggtttaattcgttcccatctgaaattgtgaaacaagtaactgtttttgtatttattgtgagaatggctattaatctaaacctaaagtcagctgacgtgaaagcaagtctcgaagatcctgccaaattgcactacattccagctacaatccgtggcgatggcccagccaaagtggaacagtattttgagtcgtacacagacgaattggaggacaaaactctcgtgaatgctcttcgtggattcccgctacgagggaaacgattcaccttacctgcggcctatagtggcgttatatttcaggaaactaaaaaaccactgtcagcggacgaggaacggaatttaagcttcgctggtgccttcaaggagtttacctattggaattacgataagataccctcgaagaacgatgcgtttgaaaaggcccttgattggatggaactgtctgacgctttgcatgaaccattggatgaccaagaagataccaaatcggatgtaaaacaagagaaataaactttgttggttgtttgtaataaagtttttattacttccattgtatgtcacgtaagggttgaaaatctacaataactttgtggaagtttcagaaaatctttcctaatcaagaaaggctcatctactgtaacgtaattattaaaagtatatatcttaaagctattttgtttctttttacgccgcactctttggaggttgccggtagactcccacaacgactgcgtggtcacgttcgtatggttccagtgtgatttgctcctgaggtttcaacttttctgattgtagttttttgacttctgccgcgaacaccgcttccggaacggctgtcgaatcgatacaggaagccttgatcgaaatgacgaaatggcctccgtttttcaggaactggtgagcattcaacgcgacgatacgggcctgatcgggctgggcaacgtcggcgaaaatggtgtcaaccaggccgaccaacattcggtacttatggggatgacgagcgtcttcaatgatggggataatgttggtccgcttcttggcgacatttatcaaatcacgtcccgatcggtgtgagaattctacggcatagaccagtccctccggcccgacaacgtccgatacatgcgaaaccgtagttcccgaggcggcgcccaggtagagaaccttcgagcctggtggcatgtgaattttgtcgactcctccgaggacggcagcagccagcttcgaccggaagggattccaaactcggtattcattcttttcgccgttagtctgca

SEQ ID NO: 1266 - DNA, 334 bp, Aedes aegypti
catcagtcgagattaggtgattgaagtaaacgcatccactagaggaaacagcaccatgaaattgacaattttcttcactctgattatgctactgcttggagtagcctttgcatttccacctgagggtactatccccgcagcagagaccaaggccgcagagattcaggatgttgcggtagataccgctaaccacaagtcgtctgaagattctaattcttctgaggatgagcacaaaaactgccacaagccgaatgcatgaagtcattacagattgagctcatgaataaaattttgttgattttctaaccaataaccattacagtgattcaaaaaa

SEQ ID NO: 1267 - DNA, 582 bp, Aedes aegypti
caaaaaaatatcatctgccagtttgcttttgcgaaactgaaatctaaaattttacttgtatctgagtaacttcaacaacatagcttatcagaaacgaaggaaatttaagttgaaaggatacaatcttgttctagtcatgtcagattccgatgggaagaccactccagtcaaaattaaagaagagctggatgatgatgagcctaaactaatgagtttagaaaaactagatagaggatcaccagaaatttggccagcaaaaggcccatctatgaatgagttcaacacaccaaatttgaatttctccccaccggcatggacaaaaggcttaacccaggacgatatcaattcgatgtatcaattgggtgctttatcgtccaacggaataatcgccgaagtgaagaaattgtacgaccaggcttatcagttgggtgtccaagaagctaaagaaatgactcggggtaaatatttgaacatctttaccagcagtcgtaagaaatcgtaacacaatcgatagcttctaattttaaagatttgttttatgtaacgtagcaataaaacgctggagacatttttataatccgt

SEQ ID NO: 1268 - DNA, 1833 bp, Aedes aegypti
atgggtgtgcgtcatttggatacgttaattcgcaaaaaggtcgaaaacgggtgcttcaaagtgaacattgaacatgaaattcgggaatactaccgtaaagcttcgacgacagttggggaggtttctccaccaccaccgcccgtgttagtcatcgatgtgtttgctttgagtggtgagctagactcgatagatttcaattcgcttatctacggtgcgcgcttcaatgttggattctggattattgatcgattcttgcggaaattgaaatcgcttggagtctcgttggagtttttcatggatggtagtgtgcaagacttcaagatacgaacttggtgcgagcgtaaagacagggattaccaagacgcaatcgcaataataaatgccgttgatgaaggtgtagatattgagacaatacttacgaccgtgggagcgccaggatgtggctacgccctggaatatctcgccgaaatgcatggtagattgacggtgtccttggaaagggaatgcgaccaagaattggctgcattcgcaagcaaagtcaacgcttttgcgatcatctccaatgactcggatttcctcatctacgaagggaactggaggtattggtcgtcgagagatctcgatatcgacaccttggaaacgctagaatacaatcgccatgctttgttacagtatttgggattgaccttcgcccaaatgcccttgtttgccactctctgtggaaacgacattgtgaagcttgaagaactaaaacgctttcatttcagtctaggtcaatactgtcacaaaatgaccaatgtcgctaaatttgtccaaccacaagacccgaataatttacagaatattctagaaaaagtttttggacctcacaaccgttccgggaaggatcgcttctggatgagtttgcaattttacaaaacggactttgtaaccagttccaatgacgacccagtagaagaaattctcctgaagcacccgaacccattcgtgtaccaactttggcacaaacagccgcacgtcgtttcgttaggactagttgacatgcgcagtaccgaattgggaaaacaagtaccctcactagtcctccgcatactgctgcgcaccgctgggatcatcgtgttgagccgtcagaagggacggaagatctacatccagacattcgtcatcaaattaacccacgaatccaaccaccggatacaacgtttcccggtgcagttcccaagtttcactgatcctccaactctcatggaactcttctctacggatccattcgtcatggcgaacctcgagaatacgaagctactcctactcagctggatcgtgtcagatcggttggactatcgacgactcagaccgatattgagacccctgctgcctaccgttgtcaccctgtaccacttggtggaaaatcggatcctgcagttgttcgaagccgatctgttgcttcaggtggcatacgatgtggtcacggagacgtatgatcccaaatcattggagttcccaaccacggtagaaagccgcccgtttaggttggcgttcatctttagaatcatgtaccgtttcgttgccattgcaatgaattccattggtttgaacttacggggctttcgggaggaccctccattcgacggagtactttttcatacgaaataccggacgtgggacaagtcggaagcagatttggggaaaatcgcgcaatggcggatttatacaacaatttctcaatgaaaaaagtaatgcttttgatttcaacaccgatgtttcttacatttttatcgatttaataaaattgacgcttgttttctcaagcgcaatatgttttatttcttgagc

SEQ ID NO: 1269 - DNA, 1057 bp, Aedes aegypti
tcggagtcgggtgtaaacaagacgacatcagtgcgtggaaattgcgaaattccgtgatatcctggaaccaaaaatccccatccggtaacgaatggatcatcctcggccgtgcggttgtaaaggccgccgaacttgtctcagctgtgagaaggatttcgaaatagaacgagtggatttccttaaaatattcaagagcagcaaagcctattcctactgtccgcggtgccataagatttacccaggatgggacactgccaaggtaatggccgaacatgatcgcaatcatgggggtgatgctggggaagactaccccggagtgtacatagatctggactttttgtccgagtcggaggaagccgaactgatgaagggcattgacgagatgccctgggacatgtcgcagagcggtagacggaagcagaactttggccccaagaccaatttcaagaagaccaagattaaggtgggaaatttcgaagggttcccaaagttttcggaattcgttcagcgcaagttcgatcaagttccgctgatgaaggggttccaatcgatagaacagtgctcgctggagtacaacccggaaaaaggtgcttccatcgatccccatattgacgattgctggatctggggcgagcggatcgttacggtgaacttcctcagcgattcagtgctgaccatgtcccgatatcgcaaagaagatggcaagaatcgatacaatttggattttgttgatcgatacaaggataaactgattggcgagctagtggacgaggaaacgatggacaagttcgatgatcgaatagttaggattccaatgccaaggcgctcgcttttgattctctatggacccccaagataccagtgggaacattcggtattacgagaagatatcaccgaacgtagggtgtgcttggcgtatcgggaattcacgcccatgtacctggaggatggcaatgaatacagcaaaagtgaagaaatttttcgattagcgaaaaacttttggaaccatttagaagttatcactagcagttgaagtatttgaataaagcatgttatg

SEQ ID NO: 1270 - DNA, 989 bp, Aedes aegypti
atcgaagaaagttttgaaaacaaaccgtcccatctaaaatcgttaaaaagttccattaaaaattccagttatttcagtgcaaagaaacataattacgccatggaggacgacctgaaccagctttccgacagaatcattgacaatttggaaaaattcaatcgcatactcaaatccgctggcttagaatccaaactgctcagcaatccggatcttcctgaccgtttactgaaactaacccaacaagagtggacacccggctcggatacccgttccgcagacccatcggatcgcctagctgccgaagacatagattccattttcagcaaaattcgacatcgtccggtgcccggcagtggatcatcccgaggcgttaaccgagccccctcacaaaagaaagccattccgctgcaacagtcccggattctgaacgaaaccaatctggccggcagcccttccggatccctgaccgatttgagcgacagtggtggcagcaataaacaagttcgaacgatcgacgtggaagctctggtcaaaagcttgaagcaatcccttcaggccataggacagatcgagaatcggccactggaagcgatcgatttcgagcgggtcgagcggtacaaccggagggagtgcatcaaagtgcgggatgccatccgagatgtggaactgatggtgcaggatctggaacggtacgtggccagtgtgcggagtggtgacgaagatcggagcgaactcgttggtgagactttggtgtctcggttgagggatttgtcggagaccatgtcccaagtgatatttatcaagaacaacgaatacattccggatatgagcaaatggactgccatcggttcgtttccactggctgagtgcttggacgatgtgaatgaaaacattcgacggaagaagctctatcaatgaagaaagttcacgaaatataaattaaatcagcctataaatcaagtttaataaaatttgattaggtagttttt

SEQ ID NO: 1271 - DNA, 1421 bp, Aedes aegypti
atggctattttcagatcattagcgaggaataaatctttattcctttacgtgcagcgctatcttagcacatcttcccggagtaagcttccggcggctgcagttacattagaccagtctacggatcaggccctcgacgccggtagattcaaaccaagacagcacgaaggtcgactaacgagcggatgcatcaacgtgccggaatccattgtcaatgccattttacgttgctgcaaagaccatccgattaaggcactgctgtccgaaggaaacaaactggacaattttttgcgatctcgtaaggttccgctggaaaatgacgagcttaggcgaaaaattaatgatctgcggcactcggtgggcgatgagttcaaagccaagatggatgttactacaatgtcagaagagcaggtgacctacatcaacaaggtgattgaggcgcaggccaagaaacgtgccaaacagcagatctacgcatggaaaccgatcaactatgacgagtttaaaagcttacagtaccttctgggacggtcagcggcagagtacgcgaccttgattcgggtttttgatgaaatcaagcaacgcgatgcccagttcaaaccgagaagttttatcgacttcggttccggtgttgggaccggtacgtgggcggtgtccaacctatggaaggagcacatcttcgagtatgtgtccattgatgcttcggcagatatgaatgacctggcggagttgattcttcggggtggagaaatgaataaggctatgagtttgaggaacgtattctacaggcagttcctgcccgcctcccacaataagtacgacatcgtgttgagttcattctcgttgtttgaactgccatcgaaaaagaaccgtttagacgtgatagagaacctgtggaacaaatgcgatggctacttggtactggtggaacaagtgtccccaccatcagcaatgtccccggatgaagctggatgacggcacgccgtgcaatttcgaggtaacatacaatccgttaccgctggggaaatcaagcgaggctagcaagttcctgtactcctatgttgtatttaaaaagggcaccccaactgcccaaagtcgacatcctcgtttggtgaggccaacgctcgtccgttcgaagcattcgatttgtcggatgtgtactgatggtggaaaactgcaggaaataatcttcaccgcttcgaagcacggcaagaacctatatcgatgtgccagggccagtaaatggggtgatcaactaccgatcaaaatagacaacctagaatagttatacaatggaatgagttttatgtaggatacaaaagagatagatgtgaattataccttgttttaagatagtaacgaataacttctttgtgatcacagctatagttttcagaccacaatataaatttagattagcacag

SEQ ID NO: 1272 - DNA, 1960 bp, Aedes aegypti
gctgttttcagtgtagccaaaaacattgtacgtaatgaaatacgttcacacgaaaaattactcctgaaccactgacatcagctttgtttacgcaaatttgggccattcatcatcaatcaatgatccattcataaaaaaaattgtaggtcgagtaaataaaactcaaattagatttaggaaataacttggaatataggtattaaattaaaaatgcctacaacgaataaggctggtccggtgtccgatgacgatgatgatttcttcaaaccaacctccaattccactttagcaaaaatctttggtgttccgaagggtggcgcagctgtgaacaaaaagtcctcaccggaaaaagactccaggtcgatacagtccacgcccagcagtaaggtatccgatcgctacggggcttcttcctttcgttacgtcccaccatcggaagcagtcgattccactacggatggggaacaacccgggagtaagccgtcgtcggattggaacctagtgcaagccagtgtggtaactgcctacaagcttgtcgggaacgagaacaccccgcaagggaagctaggattggcattgctccgttcgcaagctgaattccggattctgatctatcggaccaaaaccgatgcccttgctacccttaatttagacgctgcaacaaaactgtttttgaaaaatgaatatctccaatttcgaagtgacgacgacgacttttggagcgtcttgtttgaaaatccagttgatcgtgatcgtttacttgcggccattgaaggcgtatgtctattagaattagaacgccaaccccacaagcaacgtgttcctccgattccggcatccagaaccattcccaatgtggaggagccggattctgatgcggaaaaaggcaaagcaaatctcatctcacggatggctcgagttggccaaccgattcttccgcaagccaagcccgtatcaactacggaagtgagcgattcttccgatacggatgcacgctttgagacaatagctcgtcctagcattcctccccatcgacggccaggtaatggaggcgttggcaaaatacagcccgtaacgatgggcatgcagataattccctcagcagcgaatgccctcacaaccgccatagctggacaaaatttgctccacactgcgaccgatgttaacttcaatctattcatgacggaaagcagaatgcaaggcaccgaagtgcgaatgaatttgtcgaaattggagtccaagctggatcgtgtcttggacaaaatcgatttgatgaatttgaacagcactggtgaagcaaaatcgaacaccgataaagatgatgatatattggctttggaagagaaaattttagagctgaagaaggacaatcatgcattgaaaggaaaggttcgctctttggaagcagaagttagtacccgaaatgaagatgtgcacctgaagcaacaattggccgaatcggaaaaacgttactcagatctccagttaacagtagcagccattcagaaagatttaacatctagtcgtgataaaagcgaagtagatctcagagaaatggaacgaattagactagagcaagatgcaaccaaacaatcattgcatgaaaaagccaaagaaattgaactgctgactgaacaactaaaagatgctcacaatagtcaatcgtcactgagagaggagaattccaaactggtaaaacaaaatgaggatttgcaaagcactttaaataatatggaacaacagctgaaaagtttaaacgaaaaggtaactggatctgagccggtggatgagctgatcaaaaccattatgaacaactgtttccaacgaatgtgcgaccagattgacgatgccagaactttgaagattgtagggcaaacgatcaaacatgaaaccaaagctgctttggcgcggcggcagaaaaaataaattgaggaaaaatgttagcttgttacgataggta

SEQ ID NO: 1273 - DNA, 1327 bp, Aedes aegypti
atgacatcccatgcagaagaaactgccatcaacgcattagagagaagtttcattcccaaccacatagaaattgcggctcatgtttacaacaatgcatcagaaaaagtgctagaagtgctttgcagccaagctcagatgtatggtatcgtgcgactgattccatctgttggatttgtacaccacacatatttcgagtatttctccactttatactttctgacgtataaaaccaatgcaagcaaagaattcttttccttcatgaaacaaaacttatgtccgtctcgcctaagtattgccaccaaattcttggatcaccacatcggtggaatcaacccaaatgaagagctacaaacgttaaggattgtaaaaggagaaaaagatgcagaaaatgaagaaatagtcgagtttgttgaaatgactaaagatttcgaaccaccatcaacagcacgactccatccagagaagttacgagagtttaattactatctaggaaagctctcgcctgcggatcgatacactctcattcgtaattcgttgaatcagtcggtatttaatgttcttgaagttctgtacgacagtctgccacgcgatacaaaatgttcgttgaaattctgctttggcaatagagctcagaagaatttcgtaaaccttaaaacactcggaggaaatcagacactacaactgctgggcattcttctgaagaagaaccccaataactttgttcgcaaatatctgatagatttcagcgatggggacaaagattatttcgagatgacctgtcggaaaccgttcgttcaagtattgaattggttggtcgacgatcttatcgctacaattgacgatcaagaacgggaagctctattcagttacatcaatcatcgtttcgacaagtactttcaacttgttgtgcaacacaacaataccgatttttttgaagaagcgattaaaagaacgaaagctttgtggcctatggacaccgtcaataagttccttatggatcgagatgtgatgaatttgttcctgaaaaatgttgagctcaatcctgacacgaaatcacttctagtcgaagaacggatcaagatgatagcccatttgtacgatcttttcaaatgggctggttgtggaaacgtgatacttagtgaaagttgcaccgcagctatcgatgttttaaaaaatgaagccatacagagtgcctttaggaaacaattccagaaccagtgaagcaattaaatgtttaatttgatgaaatgttttagaaatatataaaaatcatttatatttataccttatatttgttatatttttatattatatttttataataaat

SEQ ID NO: 1274 - DNA, 696 bp, Aedes aegypti
aagaaatcaagtcgcatcgtcatgggtagtgagattatattcattctagcagtaacggcaatgttcggaattgttcaagcagctccaccggatggtaccacaatagcacttctcaattatagagaaaaatgcataaatgtaagcggttcggatgaaggattttatcaactgtttggatcgatcaaatatgctcaagcatgtttgctggatcacatggaggaggcttaccaacagggtgtaccagagatagatgaatattatgaaacgaagaaagattttttcgccaattttcgcccgaagctcaatgcagcagtagactgttttaatgacgtctttgaaggggcagccaagtgctcgactgaagcttacgataagttggtgccaatcttgaagaacgttatgtatggccttgttgagcttatttgccaaaacgggggtgaactattctacgatattcaaactcctgagtttcgtacctgttttaagctgataaaaaagaatgctttccagtgcaggacttccgaagccatcagaacaataacatattctgcattcagtttggagcaatgtcgagaggtgacagactcgcgtaactgtttcaaaggaatatgcaacgtatcagcggtacacgacttaatagacaacgtatacgatacgttgctagatgcaaccaaatgtcaaaaagaaatatattaa

SEQ ID NO: 1275 - DNA, 1070 bp, Aedes aegypti
gctctttgtttatttcccattctcaacaaaaacacaaatcaagcgattcattagtttcattgagtaaatttaaaccccttttattcgatgaaaaaatccaccgatccggatggcaaagccagtggcaaatccaccgccaaggacaaatctctacgtagcagaaacaaacggaagtacaagcgcaagaagagcgccaagcatcacacgaagcgtgccttcgagcacagtttgcgggaacacggttcccataaagctgctccggaatcggacggattcgtgcaccatcgacgaaggcgagtagaggcgaggccggtcggtgtcggaccaagttgtccccagatcaagcacgcccagaatgtgtggatgaaaacgtaccagaatatcgtcaagtggcagtaccagcatcagttgaactactggaagcagcacgccctgctgctgcgggaggaaaatgtgcgcctgaggaggcgcctcaccgtgcacgactccgaagatgaggcggatgaagcccttgcctacgcagaagcggccacttgggagctgcaaaacggccaagaagccgtcgttgccgaagacgatgaagcgctggacgaggagtttatcgccttcatggaagtatcggcccggcatcggctggaacggaggagattgaaaaatgaaagtgttcattaattagatttatgaataaattaaacaagattaaagacacatttcgtggccgaagctcaggctcctcagctgacaatccgaaactctcgcactcgattacgtaatacttactcacacgcttttcgaccggtggttgtcgtgtgataaaaagggatactgagcaggatgaggtgtgggaatggagcgcgaaacggcatctggtgtttgacacgataatgaattataagaaaggagccgaaatggaagcagatcacaggcttcattcattcgtaactgtttgttcggtgggattgtccggtatattttgtctgaggtcaaaacatgccaggcgatactatccgcttgcgaaatgtattaagtaattagtaattaaaaacctgaatttagtactataccattta

SEQ ID NO: 1276 - DNA, 309 bp, Aedes aegypti
atgtgtgcaacgaccgtggctcccgaaccatccgccctggaagcttctgtagtagccgatgaggacgacgacgatgttcggattacgtccgtggaaacgattccgattgcgttcgatctgagtgaagataacaacgatccgttcatcaagatggccaacgattggtactgttgtaaagtgtgttcccgcctctaccaggcgtttccccaactggtggagcaccttcgcgatgtaaacccggacaaggcggagatattgcgccaacgatcgaaagagtcctacttccgggccaaggaaagttacctgtga

SEQ ID NO: 1277 - DNA, 1118 bp, Aedes aegypti
gtaacgttataccacgaggaaactggaaagaaggatgccaagcacgagaaggatctactgcaacagaagctcggctttgacgaaaagctgaaagagaaagatgaacagttggaaaaacatcaaatcctcaccagcaaactgcagaaacagatagccgatatgaacgtgacacatctcgagataatgaaggagaatgagttcatgaaatccaagctgcgcatcatggaacagatgaaggagcggaggtcgctcatgccgccaccgggtaccgttcaactacgttcccacctcaagatggaggacgaagagggcgaacagttcaacaacacctacctgacggatctgaagacgggtcgtatgtcgccaccgttcggcgggcgtgaatcgatcccgctgacggaactgcagaaacgcaactcaatggttaggccgcatctcaaggatagctacgcgcttcagtacgtcgacggaaatctgacggacgacgacaatcgagatctcgctggcggtaacttggacgacagcagtacgagcttgatttcgcgcaagaaacaaagtggaaccacttcctacaaacgaccgggaccgccgacgccgagcaagaaagccggtcgtctttcgttcggtggatctctgccgaccaacgacttccagtacaaagaaattctcaaggacaacagcaatggatcgtcctcgggcggcggtgtcttcggtggccgcctgagcttcggccggaaaagtaacgtggatccttcgacggctctagctaccaccgctggcaacagcagtggcagcaatgccgacctcaacgctcgccggaagacccccggcaagttcaagcagatgatcagctcgtcgaacctgttcaactcgtcgcagccccagcagaaggacgaggttactctactgaacataagctggcgtttcgatgagcgacgaaaacggcaatacgttgttaagacgcccgtaaagtagactgtttgttttaggtttacaaaatacagtgtaataatttatcattctttggtaaattaccttcgttactttaactctaagaaaatttgagttgatgtagtttttctgtgttattttcttattttaatatattttttacaagt

SEQ ID NO: 1278 - DNA, 2948 bp, Aedes aegypti
ttgaattgttacgcgagatttgtttatttttgcatacgtcggattgaaaaaatatgcttgaattcgttgttcaaaaaataaaataaacataaacaaacaacaaactcacaaccgtttaataggcacgtgcttgtccgcttttaatatttaccttattttgtcttaattttaataagaaaattatttaaaattgcccgaaaatggatgcctgtgaagtgtgcggtcagaacgagttcacggtggaagaaggcttccactactgcgtcgagtgcggaaccaaatcgcaacggcacggtaccgagctggtggccgaattcgaagagaacatgcccgggggtaaggatgccgttgctggaggaaccatccggatcaaacaggtcaagaagaagggcaaaatgcttaccagctgggaggtggtcaactacattctgctgggctacacggaacggctggtggcgatgggagccggggaggcgttcaagctgacggttctgcaactgtggacggcctatttgcgccggtcggaggtggcgtttttcgacaagaacaaaccggaacggccccggttggatgtgtttcatcggacgacggatgcaaacataatctacaaccgcaagataaaaaagaagcgcgaacggaggaaaagcgcagattcgggtagtaggacgagctctgtgccgatttccggcgtggcgttgaccaagaaggtgcgatccgagcagagaagtttgctcaacgtggagtacgattcgttccgggccagtcagtcggatgtgaaccggtcgctgcacgagctctcggtgcgctcgttgaatgctagtctgtcgggaacggacagcgaagccagcacgaaaagtggaggccaaaggataaagtattcccgattggccaggatcaaaatgaagcgcaggctcaagatgtcaaccaagcacatcgataagcacgagagcgatgtggatgatttgatgagctgccaccggaaaaagggacaagggaaaagcaatccgcgacacagaacggatccggaaagtttgtaccggacaacgatagcctcaatcctggcgttggcattgaatgtcagtcgtagtaaggttcagtttgcggatttgatgcgattctacagagaggagcacatttctaccatgaacctcatgcagtatattccggaggaagtagactccaacagttgtatggagacgctgtgcggacttcagaaagggccatcccttacgcaccatgaacttctcgagagtgttgtaaagatgatgagattcataaacgttaaaccaattcttccggattttagtcaactttgtagacgatatgttcaggaactgtgtctgccaactgatttgatgatattcttggaccgctttttggcggtatttccacccaaaatggaacatgaaattagcagatggtttcctaattacgaagcccgagcaatggcaataattttgtttatgctaaagcttctgttcggctgtaatgactcaaccgaaatgaaattgtccaaatcagcagcgaagttcaatgcgatgcttaagaatctgggcccgtcctaccggcagctgtttgtcttccgagagtgggttcgattcctggaaatgagaaaacttgttctaggccaagttcaccatcctacaaatcgagtcgtagcgaagcaagaaggggtcgaacaagatccagaacttttcatcgattacaacttgcgtaaaaggcaaggtggagatttgtatcgggcatcaaccaagaccataaaccgcaactgggtgtccaaactgaaggattttgccaccaacgtagtgaatacttatcaccgtcttaatccgaattcaaacacgcaacaaagcatcgaattcgatcccagcctcacaccgcatcggtcgtatctggaaacgttcctcttggcatacaatcgagaaggtaaaatccatgtgcccgagttcctacacgagaatcacgaagaccgttcgattgtctcgctcgtaagcccatcggaactcaaacagctcctccgaaccaaccatcagatcaccctcaaaacgaagaaagcaccctcggccataacacagttgaaatttatcgacagggttgttgcacacaatgtcctctatcggctaatggagtacgagtctccctatctgctgatcgacgagtgcgatgaatccaactggacacctcccccgaaacgcagccatcgagacgaaccacacgagtcaatccttacccgaatcctgattcgcaacgaacaacaagaaggagaaacccactgtggcttacgacaagagtccgtcctcgcggatgactcgattctgagcaacacaacggcggatctcttcgattcgcaggaaccatcctcgcaggatagcgttatcctcccgtaccagaactccacccactcgcttctgacgcccaactacgactattgggttcgattttatcctgtcagaattctgagttctcgggaacaatttgacgaggaagttgccgtcacccttccggaaaactttcgcctggtgctggaggaatgcgcccggatcgtcgagacgcaccccatggtcctgtatcaggagctgatgaccgtggaggcgtatctgttctatgcggtgcaaccggtcgagcgattcttcgatggaaccgacacatgtgaggtacagttccacagcaaaatcgactacggcatggttaggacggtccacgaagcgaagaggaagtattgaaatagctaataattcgcaacattttctagttgttcaattgttattgtagagcttgggtttaatttacaatcaactggtttacataaggatttccgaaatcaccctaacgtgtttaaaattagaagggatacctaggcggggcaagatggccactagacttttgcaaatttcgaagttttgactccccttatctaccgtaaggacgccattcaccgctcatttaac

SEQ ID NO: 1279 - DNA, 231 bp, Aedes aegypti
atggtcttgggccaggtgcagttgaacgaattgggttggtttggccgccgtgacaagaacccaaggctgccgcttgccgtgagccgtggcttttggagatatcacaagtactggcaacccaagcggatgggcattgtcccgttcttccaggtcatcgtcggcggaatggtgtttctgtattccatcaactacggcaaactgaagcattacaggaactacaagtaccactga

SEQ ID NO: 1280 - DNA, 1478 bp, Aedes aegypti
cactcacaaacgagcaaaaccaaaacaaaaatttcgattaaaacattttacgggaaaagtactgcatttatgtgattttatgaatgttcatgtgattcgtacgtagtattaataaaccatgcagcgataccagatcgatttgagtgattttttcgttgaccatcgccaaaaagtgtttgtcggcaaacgagacaagtggaagctgatctcctgtttggtgaaacatattggtgcagttttcgggttaaaaaacatcttcatcaccgatagcgatggtgttctgttcctggaagacgatagtttggatgtgataagagaaagcgacttgttaagagtgcactcttcgaacagttcaaaggtcgctcaggaaatttgcgcgcccaaacgagtggcggcagttgactcgccacgtgcttccgttgtaaatcagaatgggaaacggaaacgtgaatcgacttctaatgataaacccacacaaagagatatatcctcgagttccgaatccgatagcgatgatgacaatgagactacactgcccaaaatattcgtcggactcgaatcagtatgcaagaaagacgaatccattgatgaaatacccaaactcaaacggaaacgaattcgcaagcggaaatctaagaaaaaacaagagggaactccacagaaagtgatcgtaaaaacttatggcaaaggtaaagttcctgccattgtaaacgacaatggagactcttcccaacatatacgatttagcaaagatgatacaccagacgaagaaggtgaaactcccgctaaagatgagccctatcgtaatctgaataagaccactgttgcccgtgtagtaaaagccgttttacaatgctctgaacccctgaccccaaacaatgaaagtccctcaatcccggattacgtagatgatcttcacatggatcaatcagtggtcaattcccagcgtaagcagaaaacccgaaaacaaaagaaatcgttggaaatcaaacaagaactcatagaaacaaacacgattcgcgctccttccccaacctgggatttcgagttggaccaggccaaggaaaatttcctatccagttatattggtgaagagttttggaccactcttcaggaagcgttggaaaactttcccaccattagcatcccgagcgtgaatgacatcatcgcttatcggctgccttccgaggatcagataacttatctggcattcgtggaacgtgccgacgatggcgatagtgacggcaacccagccctgaagttgaagctacgccgactcaacactacatcaccgaccgagatgataacctacacgttggatcagctcacggaaatcagactgatagcgacgtatcagccatagacgttttggggtaggtatcgttagctgaagatcacacgataccagatagtggttcaagtctataaaacaataaatgtctacatagaaacggacagtagttgattccggacatgtt

SEQ ID NO: 1281 - DNA, 844 bp, Aedes aegypti
cattccaaaatgaccatgaaatctagtttcgatttcgaagagcatatggagaaatacgacttggagaattcagcgatccacagaaaacttcaaagcaaagtggaagcgctgaagatcatgcgaaatgaactggaaaagtaccgatccgaaagggatcagttcaagctgatggccgaaacacttcaaatgcgatattcagccatgaaaagtagtctcaactcgccggagttccaagccgcaggctttggtaatagttccgccgttagtctattggttaatcaaactcgagaacgcaacatttctttaagtacagaagtggaagccttgcgacagcgtgttcatgaactagagggcgacatagacgtcctgcgaacaaaaaacttcgatcttcaagcagctttcaacaagatgaagtccacggaagaaacgaagctcaaagatcgcaaaggtattgtttgggacgaggaaaagtccaagctgatagcgcaaatggaaactctgaagaaaaagaatgctcaactgcagtacgatgttcgatcgttgctggacgaaaaggaggacgtagttatggaacgggacgcctacaagtgtaaagcccacaggctgaaccacgagcttagtgtgatgctcaagggtgaccaatcgcagcagaagattgtggatgttgatggactgattttggagaacaagtaccagcaggaaaagattacgaatttggaaaatgaattggaactgtcccgacagtcggccaccaagtacaagaacatgcttgacaccaaacggaaaaagggaatcatcaagcttggcactaacaacaatcagagggtcatgtctcactcacaag

SEQ ID NO: 1282 - DNA, 977 bp, Aedes aegypti
tatttttgtgattatgtgaaattcgaagcagaaacattacgattgcatttcataacgaaaatacaatattacaaattatggatagagcgcaaccagcaccacatcatcctgagggatcccgcaatgcattgaacttccaattttcgccggaggagctgaaagtgctgcaggaatgtaaccgggaagcatttttccaacgctcgatgcctctggggacggttttcggattgggaacgtactacgccgtccaaaggggatttctgaagtcaagcccgcgatttggcgccggtcccaaagtattcgttggaattacgttgggctacttcatcggcaagctgagctatcagagtcgatgtgccgaaaagattatgcgcattccaaactcccgtttggccgatatgattcgccagagacgtcagggagcgaccaccgttgaaagattatatcccgatcaagggttcggcgctggggccatgttgtccccgtttgggccggccagcccgagtgacagtgtgacggaacaacatttccgcaatcgggactcgatcaacatcgacgtccacacgcccaattattccgggctggatgaaagcgctcgaccgtctcttgattctaatcgcgccttcgaggaggatctgcagctcccggtggacccgccaccggtgacgaaatcctacgaagaattacgtcgacagaatcgggaggaatacgtgcgccgacagcaggcaccgtaccgtccgccgacggttctggaagatacgcccccgattaggcgagaggttgccgctccttcgccgagaccggaagatcatctacctcagcagccccaggtgaagaataagtacggggacgtttaccaggagtagaccgctaattggaattttgtgccgctcaaagtactttatgcagaataatgttgttcgtatcacaaacattagatactcaataaatttgcgcatttcagttttcgcatagtc

SEQ ID NO: 1283 - DNA, 2731 bp, Aedes aegypti
tttgcatcaatgaagcttacacattttgaataaagtgagttaaatttacccaaatgtcaacatttcttatcgagcgtgtactgagatccttttcgtcgattaatttaaaaagcccgtcgatgttcgccgcgaataacgatgtgtcaaaacagatggtcttctacttgtttgtatttagtgccgggaaaatccgttcgcacgaatgcgggaacggtcaaacggatttttctagccctttgaatcacaaccgtcgaacttatacctactagcctaatatctaactgtccgacttatgcatttttaaccgtcgagtttattagttaagttagcaaaattaatccaaatgattgaactgtgatcagcgtataatagtggaggaacagtgctcaaattagtttagtgttctctagtaaagctttaataattgtgttcatgaagtgctgatcgaaggattcccagaatcgattccagaatggatcaggaagcattcctcactcctcgtaagatcttccagaatgcgttcaacgcggccaggaggtcaacggccagtgcgcattcaccgtccgtcaaggcctacacgccaacatcgctgtctcggacggcggccggaactagtagaataaatttacttccggtcatccagacaccaccctccagaatggtcaaaggcaaggtgatcaatcccttcgaagcacatttgactgatcgactgcacttgccagttatttgtagtccttcgctctttcaacggccaagtactccccaaggcggtagcgtcacgcagttcgagtggacaattgacgaagtgagctatctgggtccggccaatgtggaagcgcacgaaacacaattcatggaaacgccagacccagtgctggaagcgaaggcgcaagctgcaattagtgcatactttaaagatcacagtatagttcctagtcccattggctgtcaactgcgtagccagaaaatcctactgaatggagaatctactgccatcgacagtttcatgggcagaaagtccaaacggaaacgggacggagtaacccaaactgttttaactttcccaccgattttacccaaagaagttgaagacatgctggcaccctacttcgggttccatgacaaccaacagcaaacccacgaatctatcaacgagtctgatgtaagtatcgatcatgatgcacgagatgcttcgctccgtaggaaactgttcaactgtacgacagcgtcgaccgattcggagactcgagatcaggacgattcgcttgaccatctggatatgcattcacttagtccggcgcccgtcactccggaagtcgacaaagaatccgtgcaaaacttgaagcgatcgcgttgctttggatctcaggaaatcaagatcgatcgggacgacatttccctcagtcccgtagtggacaaagagaaagaatccttcggggcgctgtcacccatttccaaaagctccacgtcaccttctccgttgaagcccagttcaaactccaccgagataccggatcacgatgccatctaccgaagcacaccggaacgtccgaaaagttttgttttggcgttgaattgcagcgccaacagtcaccacatgtccgtcgatcacggtgaaaggcaaaccgacctaacggttgatttcaacgaagaggatctctcctacgaagacaaccctctagccttgtcccaatcgtcttcctcggtggtttcacaacatccgaccacgccactacgtcacacgcccagggaaagacgccgcaaccggaagaacctttcccggtccttcctgctgtactcggacgaggatcgctttgaggaggagcaacaagaacagctacaactatcgaaggaattccaccataggagtttcgctgccatcagcagggataaggagaacatcgacagcgcaaagggctttcgatgtttggccaaatcggtcccggaaaccagcagcggtaacttctaccgcatggacagtggattcaacgaagaggaaacacgcacaagtcaagagactgtagaatatgagactgatgtttcaatgcaatccgagtgctgcgaaggtgaccggcagactccgcaacggttcaagatcgcacgttggaaaatgtccgccgcggccaattccgacgggcagcatcacacaggttgctcgataagactgtaaaacagtaaatttctaaattgagattttattttagattactaggtattattgcaaatgaatcgaagaacatgagctagagtctgtaaggtagtttcaatgagacgtcgtacgaaatgtcgattttcttaatttgtcactaaaagtttgtttggtaattttgccgcaaatttgtttcctatttttattttagtacgtattgtaattatatttcgttgcattgtaaactacgacgtgctacgtccattaaaacgctttttgttcattaattatgttgtttcaatgaaaggatcacatgatgacttataaattactttgaagcaagtgagaatccggagaaaactgcaactttgaaaatcacaagaatcttctaaggtagacacatcggtgttggccaatctaagagaaaatatatgagaagccctacatgttgaaatgtgaaataaaagctttcaaatgaagacttttaatccataaatgtatgaacaatttcggatctaagcagaaatcttatttcagtattgaaaatcacattggtcaatataggccagaatcaatttcggc

SEQ ID NO: 1284 - DNA, 809 bp, Aedes aegypti
  misc_feature (1)..(106): n is a, c, g, or t
nnnnnnnnnnnnnnnnnnnnnnnnnnnnnnnnnnnnnnnnnnnnnnnnnnnnnnnnnnnnnnnnnnnnnnnnnnnnnnnnnnnnnnnnnnnnnnnnnnnnnnnnnntaaagaaaatgactatgtacgacctggcgcaacaggactatcaggtcctggaggaaatgatttctaaagatccatcgctcattaccaaaaaggatacgaatgaacgcttcctgctgcactgggcagccctgggagggcgcgatttgctggtggaggagcttctgaaaaggacaccggagcagttggaggcaaccgatgataccaatgctacaccgctggttttggccactctgggaggccatctgagcaccgttcggatgctggtggccagaggagctaacgtgaaccacaagaactggcagggacatttcgcgctgcagtatgcctgctccaaggggcatttcgagatcgtaaagttcctgctggaacaaggcgcggacatcaacgtaacggacaaccgacacgacacatcgctgcaccgtgtggcatcgcaaggccgggccgaaatcctcaagtatttgctcgatcataaggccgaggtgaatgttcagaatgcggaaggaaatacggcgctgcatttggcttgcgaagacgaacagagcgcttgtgccatgctgttggtcgagcatggagcttcaggtacgattcagaataaggagaagaagacccctctggatctggccaaaccaggactgaaaaggaacttgaagaacaagcttggaatttctgatgaataaaattggaacgggttttcgtgcgatat

SEQ ID NO: 1285 - DNA, 714 bp, Aedes aegypti
ctttaatcagtgattgatagattagattctgctgatctggagcgaaagtaacggaagtacctacggaatgacactgaatcgagaccctgatgtaatatgcttcaaacattgcggaaggaaaattttcgtcttttctgttccctcacattgtccggtttgcagtctgccattatcacaatccaatgaagtgctaccatttacgctaccctaccccttcgtcaacgcaacgcaatgtccctgttcggtggttctccggtcgtcccacggagacttcctcagcaacttccagaacagtgtcaacctgcacattgccctgactgactcgtgcggttcgatagttgagttcgacagtccaggtttgttatggacgccggccaggaacgtggacaaagcccaatggaggcagtgtgtgttgatcatgcaggtaccggaagcgtggtacgccgagtgggatcaaactctgagaaatgtgatagatcacgagggttggagacgaaaacagtatgacgaggatcatgtaaattgctatagttttgttttggattttcttagacacttacaatatgaagacacttcgcaatttgttcatgatagacaaacattctctacaaaattcgttgtgccaaaaactgcatatgcagccaagtttataacaatatttagaagggtcaaagataatagcttttggccagatgaaatcaatagtgaatgagg

SEQ ID NO: 1286 - DNA, 1143 bp, Aedes aegypti
cgaatgttttgcgtctgatgatcgctttttgttgcccttccacatcgcagtttttcataatatcgatgcgaccgatacagaacaaaacgaaatcgagtgacgattgtgagaaaactattaatttttaagaaaatggattcataaagtaagacagtttagttagtttataagtgtagaaagttgtgcacattatttgtcgcatccagtgaccgaatccgggataccccgagagcaaaatgactttccttagtttgctgagttacttctcgctgctggtgcagatctgcttcgtgaccgtgtccatagctgctggcctctattaccttgccgagttggtagaggagtatacggtcatggccaaaaaggccatcacatggatgatcatgggttccgttctgttgtacatcgttttcatttttacggaacgtttctcgtggacactaatactctgcggtcttggggcgcaggcccttcatgcagccatcctgaagaacttcccgtacgtgaagttcctatcgccctgcttcctaggtgctgtgatattactcctggccaatcattacttggcgttcatctatttccagcagcaattccatccattcaccgaggtaatggcatacttcacactgtgcctgtggctggtgccattcgcactgttcgtgtctctctcagccaatgacaatgtcctgccgacgagcaacgagaggacgcatctgttaagtgataacgacgtggtgacgaactacttctccagccgcaagaagatcggtctgctttctttgttcaactacgcgaaggaatcgcttctgcccgaacgaaacaaaaaagcattttagttgtacttaaatgatctccagttattacgtaaaaccacccgccagttggagggtgttaatagggactgtaaatgttttgccatcatttgtacgaccactagggtgtaagcgtgtaaggtacactgtgtaacataatgacgaaactacataaaatcttaaggtacgcacctcaaatgtgttcttttgaacccccataagctactgtgaatgtttgagcggaattcatccaatctgaagggtctaaacgagcttgaaacttgtatggaaaaccgttctagtataccgtgatgctatcatatttcgcgca

SEQ ID NO: 1287 - DNA, 183 bp, Aedes aegypti
atggctttcggtgattatccggtggagtacaacccgaagatccacggaccttacgaccctgtccgttactacggcaagccggatacgccaggtgaagttgatcgaattgggtgcttggtttggccaccgttacaagaacccaaggctgccgcaggagccgtgagccgtgccttttggagatag

SEQ ID NO: 1288 - DNA, 4125 bp, Aedes aegypti
gaacaatccccatatttttgaaacaaaatttcattcaaaattttaggccccattttcgctctagctgcttatcctttttccagcggaccacagaaaaaaaaatctgcaagtgaatttcagttcagcggatcaacctcgaacgcgcgccagtgcccactccctcggttcgactacttttcgcccttgatttcgcccgggcgctttctttcaccgttggaaatttttgttagctctggctgccatcccgattcggtgctgaaagtgcagtgaaaattcgaattttattgctttatttctggcggaaatcgtttcaatttgtggtggagtgttgaagtaattacggggaaagtaagaaacgttgaaagtggtgcgattttccgcggaaaagtgttttgtgttggagtttttgttgttgcttgttgctgttatggtttaacgcttttttctgcttgcggggattgtttgacgagcttggatttctagtgtgtgaataattgcgaagcgttagaatggatgatctgttgcacaaattcaacgaaatcatcctgcaaacatttgcagcggaatctcgtctggaggaagaatttcagaaaagtacgaaaaagttagatgaacatgtcacgcaatcgatcaccaatggaacgccggttcaaagtaagaaacgtccgaaacggttggaatcgatggaagagacaggagaagctggggatgacacgttcgcctcgacgaatagttccttgcatacgtcgagagctagtcagaggaagaacagcactcaggccaagggacgagacaaggtgcgatccctagtggaagaaatgacggccgttgctccggcgtctttgcctccgtcggtttctccggtggttgaggaacagaaccaggcgaatgccaaacctcaggaggacaatgagaggcgtccggctagggctgctcgggtcaaggccacgcagaatttgaaggaacccagcttgcatatgaagatgcgacagccaagcatcacgatcaagaaggagcggatttcggaagaaattcggaacgagcaacaggtggaaccgatggaaacggacactgagaatgatggtaatgctttgaacgttatggaaaaggtcgttgattcggagaagcggaaatccaacgatgaaggattcggcagcacgaatgagaaggacaaggagagcgaggaacctcccgcgacggaaatgtccataattctgataccgaaaccgattccaaaagtggaagtgctgtcggatgatgaggataccggtaagatgcctccgcctatgatgccaccgccgccagctcctaaaacgaaaactcgtactaagaaggcagataagtctaaagttaagacctcaaatgtactgccggtcaatataaagcgcgagaaagatgccgacgagacgtcatctagttctgcgatttcgtcggcagattcttcactttcgaccacttccaacaaaacttctactcgtggtcgaaagaagaaaacaagctcccaacctgaaccggccaaggttcatatcaaaacggaaaagctttcaagcgaaggcattcgcaatgacagcaagtccaaaacagtttccactaatagtcccacacagtcggagaagtcagtttacgaagacgctctggacggagatgcggttatgcgtccggtggccgtggcattgggtcgaattccattgattgccgatggcgagaaaaatcaaaccttcgccatggactcaaacggaaccttctcggttcccacatcgaacggaacgttcgttgttccctctccagcgaatggaacattcaatatcaagtctcctgaaaatccagcaaacggcactttcgatgtccgtcagctcccagggccaggcaatagcactttcgtaatggacaaaccaaaatctgctgaagaccagcagcgtgccctaatcaacgccagcatcataaccgaagataattcccacatcgaggaaagtccagaaaagccaccgcctccgaaagccaagaaaccagttgtggccaaaaagccccaagcagcgtccaagtccaagaaacacaacgaactgttctccttgcaatcccccatcaaaacccgaatcgaagccttcgagaaggccgccgttggttctccgttccattctcgtactgccgccaccagcaaaaacaccaccccatcccagtccaatcgattcccctcgaaaacctccaccactccgctcgcctcccagcgatatccggcctctgccaaagcgagcacccagacaaccccaatcgcccaaagcaccctccccctcaccaagggaatctcctcgtccgcctccaagttggcccatctgcagaagaaacccaccctggcctccgcaaatcttcccaaatcgcaaagtctatcccgcgaacccagcattgaccggggcaccggaactctgtcctcggcatcatccaccacgtcgctcgccatggacgagaagaagaagaaacgcgaagagaagcaacgtctagcgcagcaacagcgtgagcagattgaaaaagaaaagcgtgaaaatgccgaacggttgatgaaggagaaggaggaaaagcaccgcaagctggtgcaggagaaggaagataagctgcgggcggatttggttaagaaggccaagaagatggaggagttcgaaaaacggcggcacctggaggagctgaaccagaagctgctggcggagcagaagcgcgaggagttggccaaactggagcagcagcagaggaccgaacgcgaacaggccgaactgttcaaaatcaaccaggccaaggaaaactacgaaatcaaactgcacaagcaaatgtaccagcagaagatgcaacagcagcagaaactccagcaggctcaggtcctccaacagcagcagcttcagctgaagaaattgaaacaaaatggcaccgttgccacactggaaaagaatctgttcacgttcgatatgatcctaacggacgattccactgacgacgaaagcaccagtgctagcaaaaaatccaaacgtcccccgctgccggcgtggtgttcaaaggaggaacgcaatccaacgatccggacgcagcgcgagatcaagctgaaggtgatcgaccagttcttctcggtggcgccgatgacggccgatctgcgggagatattcccctcaatcgacgcccggaaattgaagcgaaactcgagtgccgtctggcggacaccgccgcggtactcccagatgcccaagtattgaggggactcggcatttgccttagttaagctagctactaacctacctaaccacacactccaattgtaccatcgtcgttaagtttagcgcccaagatgattgattgctcccagccaagcgtaagtgggtaagtgtgcgaacgattttatgttttgtgtgttattattgtgggcgtttcggaatggattcccctccaagttccaacggatgaactttgtcgaatataagctatgggttatgttatgtggctattctcgaatgaagcgaatcgaatgaagcgaactatcgaaagtatgtaagatgaaacttgagtttaaaccttgagcgaggtgttcggaatagattagaagcacctatctgtgcgcatcaacagcgatcaataactaaccccgtaattataggctaataatgagtttgtcaaacgcaaacgaattaaatttcgtcgtgcaaggctttcggttcgaactggtctgaagctgcgatcaacaaaaatgatgattttactcattgcgacactcttttgttaaatatgtttcttacttaaacatcgataaataatcaatctcacggtaatcactattctaagcaaattgaaacgtattaagtattagaaataataaaatttgaatgatttttttttgtaaataatttaatatatcgaagtgtggtttcttgaaagaacaaatcgccctgcaaatccaggcgggttcactgtattctagatgtcttgcttaaaaccaagccattgtctctgaaaagatacgtatctagttataattagtacttttcttgctgggttaggtggccactcgacgacacaccaaaccaagtctcatcatttccgggcgtattgtaaagctccatcttcgtcggtctttggcgatacttctccagt

SEQ ID NO: 1289 - DNA, 695 bp, Aedes aegypti
atggcgggtttctgatcctcgtgcgtccgcgatcgcatcttttatccggtttatttattagtttgttccgtttgtttcctgctttatttaaataatttgattcaaagtccaaatcaatctcgtggaagcaactgatgccagcaacgattccttccggaattctctcagggtgcggcgtttcccaaggattcctccattaaccaattcccaagtgatgatatcctgcaaacaagagttccagtttgtgattgaaaatacccgccacggatgtgaaaaagaatccgctctatggatgtttttgggagtttttcgaggattttgttcagggattactttggccgccgggttggaggatgccgcaatttgtgttccgcaggaaatttattacaccgacggccagggagatctaggttttgttatttaccggaatagatgttgcagatacatttatgatcggcacgaaaaacatgaacgggctctgtgaatcattgtactgtttgctgtggatatcaaaacatcctggactcatcctggagtgccttcaggcttgttttttatctaaaaagtgttcactgcggcaccccggattcatcatttggagcttcccagccattatgctccatcatttgaatatttgtttaatgcaataaaaatgttataaatggtgcaattaaaataattgatgatttaaatga

SEQ ID NO: 1290 - DNA, 1671 bp, Aedes aegypti
atgaagaacatccctgttaccctagtagtggaacgaagatggatttgtccttgttggggcacagcagggtgcattgtgtgggacgagcttaatgttcgcggtattcatcgtgctgtgaaagtgaaagtattctggaagtacataaacacacaagtgtgcaaaaagcttcttgggatcacaggatgggtgctctacgtgacgcgttcgttcggtgtggtctacgacgagtacgtcgtcgatcagggcaagaatctgacgctgccatgccggtcctcctacccggtgatgtgggtgcacgagggacgtcgcgatgacttccagcagcgattccagagtgacggctccctccagctcacaaacctgacatccaaagatggcggcaaatacacgtgctcggagttggtcccaaccttcaccacggtacagctcgacgacattccatcggcggaagacagcaacggcaccggcgaggcattgctaatgttcggtcctcgtaacgacacccagaacatcagtagcagcagcgaagaggacgaaccatcgacgccatcgtcgccacagttcgacagcactcccgatcgatacgtgcagatccgacagttcaacgtaaaggtgcgaacacctccgttggccgtgtccaacttttttgtgcgggcctccaccatcattgccgtgctggtttgggaggttatgcccaatcggaccggaggctacgccatccgggactttaccgctgagatgcgtaagcttcggtggagcgacgaggaacccgaggaacgctgggaaacaatcgatccgcggcacatcagcccgaatgcgcgtcagctggagatctaccatctgatcccgaacacgacgtacgagttccggatctgggccaacaacgctctgggagccggagaagtgatgaccatcacagcgaccacctcacccgatatggaggagaaagacctgatccggcggatcatgatcgatgcacagaacttcgatacccgcgtttggatcgcagcagtcggcgtcgtcatgggaacgctggtcatcctgacgctcgggacctgcatcgtgctgtacaaggagtgccgcgaacctatcggtactagaatgaactataactgttgttgagctatttgattttgttggtttgtttgttctacagtttggtttgaacatttattttattttattttattgataagtttacattttgaaagtaactagatgcattttttcaatcaaagggaccaagttttgaattttgcacactgcaacaaataattcgatagattttatggaatgattcgtttaaaagtttgctttttcttctacacttatagatttgttatcgaaaattctcaattgttagctagaagtagaagattttcagacattttgtttgcattttgattgaccttcttcatttgtttgacaagtaggtagtttctaaattacatagatacaaatactctgacaaagaaagtaatagcttttgcggacaagtacaccaacacgtgctcagtaaaaagagcgtaggcgctcacgagtggcttcattagatagcagagcaagctttattaaaatatttagatatacatagtaaaaattatacaactagagagtagtgccaaaacaaaagacaataaaggtgccacgtttgggtaaacaaggatactg

SEQ ID NO: 1291 - DNA, 624 bp, Aedes aegypti
taaaacacccggtcgtctggaacaactgatatgcaattcaaaggagcaagaagcttcctcgcaatcagctgaaatggcctccgtctttgctaaaacgaaacaaatagaacacgggaaaaccggaaccaaacaggaagctgcatcttggcagttcgtcgtcatcattccagataagagaagcggaactcgtttcacttgttccattggtatcagactggccatgaagggacaaaggcaaaaggcgtcgcgaagctgccgacttgaaacagcttggaaccaccatcagcagaaaacagcggcccgtgtgttatattagtgtttatcaccagaaaaaaagcgaagaaaatgcataaactgtgttaaaaaagtgattgagtgatgaacaataataatggaaataaaaattgtacttatttcaaaataatagtgaaaccagtggtacgtgtcgttcaaactcgcttcaaacaaaaacagaaatattatggtttttttttctttcgaatgaaatgaaattgagattttaattttgattgaaattaggtttttacacgtatctacttgtttcactgtttcttcattttttcttaattttatcacattttgttttattgtttgaatgtaaca

SEQ ID NO: 1292 - DNA, 1158 bp, Aedes aegypti
atggcgtatcaaaaaataagaaacatattggaggacaccaaccaccgaatcgaaaaattgcacgtgccttacgaaaatgaattccggatgcaaatcaagtatcttcatgtgaaagaaaaggccatccttcgccagttcatttttgaacaagagtggaacttaggtagctcgaaagtactgtccatgttacaggaagcgggaatcgttactgcctccgaatatgtgcttcggttacgctccagctctgcgatccaacaggtaatgaacgatctactggaggttgaacacattcttctggccgatatcattagcaacgcacacttggacacatcctactctacgaccctccgggaagtccttcacgacagtttcaattccgttctggacgaccttatcgccgaacctaatgtggtcccgtgcaactatctggaacggctaaaatcccatctaccggatccggacctgactcggctccgtacccaacacctgcaactgcttcttgggaaggagaaacttcatgcgttatcggaggctgttggtctgcaagagcagtggagagcggaatgcgaagaccgccgaagtaccacattaggacgaatcatgctggaagtggtacaagaccaggccaacgcgatcgaaacgcttttcgcctcggcaaaaacgaagagcttgtcctggaagtactatctcgccctgctgcacatggtggcggttgcaatcgaaggcgataaggttgaaattgttcgcgtgaaaggcattttgaaggacctgttcaaccgagtggtagatgccggagactttgaaaccttcatgatcctgatggtgagcgctagggagatttgcatgtccaacgaacgcgttttgggaagctattccggttggtataaggctacgataggtgaaatgagttaccgaatcaagaaggagcagtttgcgcatgtggtggaactaatgacaagattgatcggcctggaaaaggatccggaagtgcttaaggtgcacatcaacatctcggtgagtactcctccaaagtgtatggagttgattgtgaactacaaacagctatgcagagcccatctagctaaactgctcaatgaaaggacacgcgacaatgtgagcatggattgtgaaacgtccattgtcatcgatgatgattaa

SEQ ID NO: 1293 - DNA, 1534 bp, Aedes aegypti
ttcggtttttcatctactcacttaactaaagttttcacctaattttatagtaattcttagagaaattgatggacgagctctagaagaattctagaagcaattttaaagaaataaaatggagagaatactgtactggatcatgaagcagataatttgaagcagctcgacagacctactacgtggatgaatttcatccagagataaaagtccagccttcacacgcatcataaatctacgctatacagaaaatacggataaaaggttgacaatctcacggcttgcagacagatctgcgaagaaattgagtaacgcgcagatagcgcttgtttttgtcagacaaacgtggaaagacattttgcctaagaatgaccgcaaaactatccctggaccaagtgaacgccttgagccctgccgagttccgagaaacgttctacaacgtgattgaactttgtccagcggcggcaaacttttgcagtcacatgttaccgttttccagtgttaacacgatgattcacagttttcacgagtaccttagtggcttggacacggagtccaaaatcggagtgatacaaggccatcctgatttagcgggcagactactggccacacaccagctcacgcaagaatccagctttgaacactcgtgcgccggattggatcaactgtcgatcgagaatggtatacagctgaatgacttcaataatagatataagaacaagttcaactttccattcgtgatctgtgtgcgccaagctagaaagattgacgttattctcagtgcagtgatggcgcggatacacaatagcttagaagatgaagtggacattggcattgaagagattctggcagaggttttgcagaagttcgtttattggcctgaacgagaagaaatcacaaaaaacattccgctttgttttcgaggaaaatacgaacgagtcagatgcatactcgattgcaccgaaattcctgtcgcaacaatgaagtgcattaattgttgcatagcgtgctattctaattatggaggaatgcgaacagttaaattcatgataggtataacaccaggtggtctgatcagtttcattagtaaggcgtacagtggaaaggcgtcagataaacaaattttcaatgatgaaaatgtgcttggcttgctttcaaaaaattcttggaatggtaatgattgataaaggattcaacatccagctcaacataccgagaaggatgctgtactgaatgaaagcattgcgaaatcgaggatccatgttgaaagagtcattcagcgcataaagcagtttggtatttttaaatccgcaattgatgcctctgtgttagggttgatcgactatataatgaaagttgtatgtgcaattgtaaatctggcagccccaattttgaaagatgaaagattttaagagtgttacagtttatatcttttaatgattgttacttaatagtaatttattagtttattacatattgttgtaattgttgtcaattgaattggcttaattaacgggtttaagtcgacagatttacc

SEQ ID NO: 1294 - DNA, 396 bp, Aedes aegypti
atgattcacagttttcacgagtatcttagtggcttggacacggagtccaagatcagtgtgatacaaggccatcctgatttagcgggcagactactggccacacaccagctcacgcaagaatccagctttgaacactcgtgcgccggattggatcaactgtcgattgagaatggtatacagctgaatgacttcaataatagatataagaacaagttcaactttccattcgtgatctgtgtgcgccaagctagaaagattgacgttattcttagtgcagtgatggcgcggatacacaatagcttagaagatgaagtagacattggtatcgaagaggtggaaaagatttgtgaattgcgtattctagagctggtggatggtcaaagtgattcaatttag

SEQ ID NO: 1295 - DNA, 20 bp, Artificial Sequence
  Single strand DNA oligonucleotide
ccagatcacccgaactgaat

SEQ ID NO: 1296 - DNA, 20 bp, Artificial Sequence
  Single strand DNA oligonucleotide
aggctgtcaagcggatagaa

SEQ ID NO: 1297 - DNA, 20 bp, Artificial Sequence
  Single strand DNA oligonucleotide
tcggcattcgtagcttcgtt

SEQ ID NO: 1298 - DNA, 20 bp, Artificial Sequence
  Single strand DNA oligonucleotide
gcagctgacagtttgccttc

SEQ ID NO: 1299 - DNA, 20 bp, Artificial Sequence
  Single strand DNA oligonucleotide
cagaatcccagacccggaac

SEQ ID NO: 1300 - DNA, 20 bp, Artificial Sequence
  Single strand DNA oligonucleotide
ttggcgaaaccgtaccttga

SEQ ID NO: 1301 - DNA, 20 bp, Artificial Sequence
  Single strand DNA oligonucleotide
actttccctggcctttccac

SEQ ID NO: 1302 - DNA, 20 bp, Artificial Sequence
  Single strand DNA oligonucleotide
gcgaaacgtgaaggtgctac

SEQ ID NO: 1303 - DNA, 20 bp, Artificial Sequence
  Single strand DNA oligonucleotide
tgccgagaacagtgatcagg

SEQ ID NO: 1304 - DNA, 20 bp, Artificial Sequence
  Single strand DNA oligonucleotide
ctcagatttttcgccggtgc

SEQ ID NO: 1305 - DNA, 20 bp, Artificial Sequence
  Single strand DNA oligonucleotide
ggactcgtcggagctgaaat

SEQ ID NO: 1306 - DNA, 20 bp, Artificial Sequence
  Single strand DNA oligonucleotide
aactgtccgagagggtttcg

SEQ ID NO: 1307 - DNA, 23 bp, Artificial Sequence
  Single strand DNA oligonucleotide
tgagtttctcgagaggaaaacct

SEQ ID NO: 1308 - DNA, 20 bp, Artificial Sequence
  Single strand DNA oligonucleotide
tcactacccctccctcgttt

SEQ ID NO: 1309 - DNA, 20 bp, Artificial Sequence
  Single strand DNA oligonucleotide
ttcgcagctttcgtcatgtg

SEQ ID NO: 1310 - DNA, 20 bp, Artificial Sequence
  Single strand DNA oligonucleotide
tttcgaaacggcgcaatcac

SEQ ID NO: 1311 - DNA, 20 bp, Artificial Sequence
  Single strand DNA oligonucleotide
agctgccatgtctcaatcgt

SEQ ID NO: 1312 - DNA, 20 bp, Artificial Sequence
  Single strand DNA oligonucleotide
ccagttggaaatttcgcggg

SEQ ID NO: 1313 - DNA, 20 bp, Artificial Sequence
  Single strand DNA oligonucleotide
ttctgttggacggcccttac

SEQ ID NO: 1314 - DNA, 20 bp, Artificial Sequence
  Single strand DNA oligonucleotide
agcccgcaaacggtgtaata

SEQ ID NO: 1315 - DNA, 373 bp, Artificial Sequence
  double stranded RNA
ccccgtcgacggccacgaagttacgatcaagatcatttacaagcgcaaacagcgaatgagcgagaacattcaattctacaacattctcttccaacgcattatgaaagtcctgaagatggtcgagatgggtcgtaagaactttgacccctcggccccgaaactgattccgcagcatcgtctggagatctggccgggatacgttagcgctgtggacgaatatgagggcggcttgatgttgaatctcgacgtgtcccatcgtgtgctgctccagacgacggttttggatcacatccgaacgctggcaagggccaatccccaagattacaaaaacatggccaccaaatcgctgctgggagccgttatattgacccga

SEQ ID NO: 1316 - DNA, 431 bp, Artificial Sequence
  double stranded RNA
tcttctccaccacagccaatggcgtacaggctggagaacaggcagattggacggcccatttccgtaacaatcccatgttcgctacggtgcggttgacgcgatggtatttgatcgtaccgaaccgggcttcacgtgaggccaacgatttcctgggctgcatgattcaagccgcacgcggtatgcgatttgagattagtaactgtgaggtggtcaccattccggacgacaacccaggtacctatgtgcgaacattggacaatctgctgaataaggacccgcagttggtgatgtgcgtcgtgaccaacaataaggccgatcggtacaccgccatcaagaagaaatgttgcgttgatcgtgccatcccaacgcaagtcatggtacaaaaaacgatcacaccaaagggtggtaatgtacgaacactcatgtccgtg

SEQ ID NO: 1317 - DNA, 289 bp, Artificial Sequence
  double stranded RNA
cgagtcaacagaacccgagcagcgccgatccgatgaaggtggacgacctgtgcatcagcctgcgccaaatgcagatgaagtccaaggagcaacaacaggcgctgcatttgatgaaatgggaaaagtacttccaccagaacgacgacggtgatacttacctacaccttgccgtgatccacgaggctaccgaagcggtctataatttgattcacgcggcaccgcggccctggctggacattcaaaatgacattggccagacgccgctgcacctttcggtgctgacgggcca

SEQ ID NO: 1318 - DNA, 448 bp, Artificial Sequence
  double stranded RNA
ggcgattggtggttgttatttccagagaattcttgaaaagtccgttgaacaatttctttgttatgtacgctcaagccttgcaaattgaacaaaagaaacgtaaaattattccttgcgtgtacgagcgattggagcttcctgcaaacctaaagttttatttcattttggactacaagcgctcgaacaagctgtacaatttttgggacaagctggaagatgccataaaagttcgaacagattccccggtgactgaaattaagaatcaatcaaaagcaatagaaactgtaagcattccaaaaataacagttgaagatgcaaacgaatcatcggcagataaagttgatcgaacgcaaaccaaaccagaacaactcacaactggtacatcccattcagtttctcagcccatcaagaaatcactatcatcgtgggatgttagcaatgcgctcaa

SEQ ID NO: 1319 - DNA, 242 bp, Artificial Sequence
  double stranded RNA
tggtggtggtgtcctgcgtaaccaaggacccgccctaccggccccatccgcacaatctggtcggcaaggagggctgcaaaaagggagtctgcacggtcgagatcaacagcagcaccatgagctacaccttcagcaacctgggcatccagtgcgtcaagaagaaggacatcgaagaagcgctccgcctgcgggaggaaattcgggtggacccgttcaaaactggatacggtcacgccaggcag

SEQ ID NO: 1320 - DNA, 261 bp, Artificial Sequence
  double stranded RNA
gcctcagtgcaatcttcacaaccggaaatgcgctcccagaggaactggccgacgatgttcgctcgtatgccaattctttgtttgatgaacttccggaggaatcttaccaagcggctgtggaaaacttccgcttgaaacgggccacctgcgatctgctgagtgggttcggtgtaggagatagtgcttgtgccgcacactgcattgcacggcgcaatcgaggaggctattgtaacgcgaaaaaggtttgcgtttgtcgaaatt

SEQ ID NO: 1321 - DNA, 528 bp, Aedes aegypti
agccgctggatactacgctagtattttactatgggcatcattcgcttcgtggttgctgatgaatttgctgttggtggctgtgccacggtatggagcctatactatgacgcttactggcgccctgttgattggggccagcattggttacagccagatgctaccgaaacgaccgttgacgatcttcatcgagggaggccgcatcagttttcgactgggatggtgcttttggcttgtgctgattgcaggcattctctgtttgtcggttggactgataatatcaatcatcgatctggtgtggcctcatcgtttctcaaccattctggaggtttattacgatactccctatgacagacacgtgatattggaagaatctcacgatgtccgataccgtaaacgtaatagcaaagggctagaagatcctccaggccttggatcgcgaatcctacgtcgcctatcgtcgaaaactcgggaccaagcgaatgataaagcaggcatcgagaatcgaggcttccaacatgacgtaccgaa

SEQ ID NO: 1322 - DNA, 524 bp, Artificial Sequence
  double stranded RNA
atcgcatcatcttttcctggtgttctacggaatgatgttctaccatccgctcagcaacatcatcaaacatcaaacaaatctgaaggcgcacccgaatggttgcgatattatcgatgaccatgtgttcaggaatgattcagttctgcaggctatttgcagtgaggaaccaaagttcagtgccggagacaaatcggcgtggatttggccactaatgggactatcgatctacattctcgacataatcattcgatacctcatcgcacactcggacaggcgaaaagtatccactttgcagtcgtacgtcctaccagctaacggagtatatctacgcctgcgatttaccagtagtaagcgcattgtgatatccgcaggccagtacgtcctcttacagtgtccagccatttcgacccttgagtggcacccgtttacagtcgttgacgtatcaatccacaatacggtttcgctaaccgttgcagttaggggcgactggactcaacgattgtatgaccttgtttcggaaaagg

SEQ ID NO: 1323 - DNA, 355 bp, Artificial Sequence
  double stranded RNA
gtaaaacgacggccagtgatgccaagcaaactcgcgctaatccaggaacttcccgaccgcattcaaacggcggtggaagcagccatgggaatgagctaccaagacgcaccgaacaacgtgcgcagggacctcgacaacctgcacgcttgcctaaacaaggcaaaactaacggtaagtcggatggtaacatcactgctggagaaacccagcgtggtggcatacctagagggaaaggcccccgaggaggcaaaaccaacactcgaagaacgcctccgaaagctggagctcagccacagccttccaacaaccggaagtgaccccccacccgcaaaactgtagcatggtcatagctgtt

SEQ ID NO: 1324 - DNA, 534 bp, Artificial Sequence
  double stranded RNA
ttcgcgaagtaccaggtcattgtttgcacatgtcaaatattgttggacgtgctgaagcatggttatctctcggttaaacacatcaacttgcttatatttgatgaatgccaccatggtgtaggagaacatcctatgcacgggattatggaacaatttctgagggttcctaagtctgaccacccacgtgtaatcggtctttctggaatgttactctataaacagattaaaagtgtcgccctagtatctccagaattggaacgcttggaaaatacatttaacgcgacaattgctaccgttgggagttatgatgctttcaccgaggtctgcaaattttcgacagatcccaatgaacttttggtgtcttattcaacccttcgactgtcacctgtgatggctgacatcgtgaacaacatcaacgctttcagtcaaacgattgaagaatttcaccttccaaaatatttaaatcaaaataaagccctcctaaaagacagaccaaagccactgaaagagatccgaaaactcttcacacatggt

SEQ ID NO: 1325 - DNA, 2583 bp, Aedes aegypti
atgtctgaccgttactctcaagggcgctaccgtgcgcgtggttacacagaagtggggtcgccccacgaaggccgtggaagtccttcttctcgcccagcctacagttcgcgcgatgaaggtcgatcgagggaaccgagagaacaccaccgtgaatcatcggcaggtggccgtgaacggtccggaaacggtaatggaggagatcgtcctggtggtgaacgcggcgaacgacgccaacgcagtcgccgtggcgttggagatacgctccgtacccgtgctctggatgctccatcgaagcatggtaccacgggtcaggctctccagctgaacagtaactatttcaaactgttgaaacacatcgagtggactctgtaccagtatcggttggacttctccccgcaatgcgccagcatgcgtctcatgcagggattggtcaacgaacacaagaaaatcttcggaggattcctgtttgacggaactcaactgttcatggtcaacaaattgagaagcgatcaactgacattgcaatccagacacgaacgtactggagatgtctaccagctgcgcattgtccatacgggctccgtggatatgaccaacgaagccggtatccaagtgctgaatttgattttgcgtcgcgctatggcgggtttgaatcttcagctggtcggtcgtaacttgtacgacgcggctgccaagatcgccattcgtgagtatcaaatcgaactctggccaggttacattaccagtattcgtcagcatgaacaggacattctggtgtgttgcgaaattgcacataaaactatgcgtatgcagacatgctacgacatcttgcgcgattgtcagaagcacgatcgtaactacaaggattcgttcaaacgtgccgtacttggtgtcgttgtactgaccggttacaacaataaaacctataccattcacgacgtcacgtttgaaaccactccggagagtacgttcgataccaaggccggtaaaacgtccttcattgagtattacaaacagaagtacaacattcgcattcgtgatccacatcagcctatgttgctgtcgcgagccaagaaacgcgatctgcgcgctggaggcagcgaactcatggccctcgttccagaactgtgccagatgacgggtttgaccgatcaaatgagatctgatttcagaatgatgcgtgccatggccgatcacactcgtctcaacccggatcgacgtattgaacgattggagacgttcaaccgtcggttgcaaacgtcgccagagagtatggaagtcttcaagacctggcagatggagcttgaccgacgtcttatcgatcttcctggacgattgttaccacaggaaatgatcttcttctccaccacagccaatggcgtacaggctggagaacaggcagattggacggcccatttccgtaacaatcccatgttcgctacggtgcggttgacgcgatggtatttgatcgtaccgaaccgggcttcacgtgaggccaacgatttcctgggctgcatgattcaagccgcacgcggtatgcgatttgagattagtaactgtgaggtggtcaccattccggacgacaacccaggtacctatgtgcgaacattggacaatctgctgaataaggacccgcagttggtgatgtgcgtcgtgaccaacaataaggccgatcggtacaccgccatcaagaagaaatgttgcgttgatcgtgccatcccaacgcaagtcatggtacaaaaaacgatcacaccaaagggtggtaatgtacgaacactcatgtccgtggctacaaaggttgtcatccaaatgaactgcaaactgggcggtgttccatggaaggtcaagatcccactcaacggtttgatgaccattgggttcgacgtttgccatgatggaaaggacaagtccaaatccttcggagccatggttgccacgttagatcacgataacaagggtactccgaaattcttctcgactgtgagtcagcacacgcacggtgaagaaatttccaattatctgcccatcaatacggtcaaggcattgaacgaatatcgtaaggaattcggagagctgcccaaacgtatcatcttctaccgagacggtgtcggcgagggtcaacttcactacgtgtacgagcatgaagttaaatccatcgttgagaagctgaaccagatctacaaatccgctggaatcgatcaggatgtgttgctcaccttcttcattgtgaacaaacgaatcaacacacgcttcttcgaccatcgtcagaatcccagacccggaacagtggtcgatgatgtcgtcaccctaccagaaagaactgatttctaccttgtgtcgcaatcggtccgtcaaggtacggtttcgccaacggcgtacaacgtgatctacgatacatcaggcctgaagatcgatcacctgcagatgctgtcgtacaagcagtgtcacttgtactacaactggtccggaacgactcgtgtccccgcggtatgccagtatgcacacaagctgtccttcctggtggcgcagttccttcaccaggcaccgagcaatctgcttgaaaagaagctgtacttcttgtaa

SEQ ID NO: 1326 - DNA, 300 bp, Aedes aegypti
atgcgtaccctcaccgttgtttgcttcgttgctctttgcctcagtgcaatcttcacaaccggaaatgcgctcccagaggaactggccgacgatgttcgctcgtatgccaattctttgtttgatgaacttccggaggaatcttaccaagcggctgtggaaaacttccgcttgaaacgggccacctgcgatctgctgagtgggttcggtgtaggagatagtgcttgtgccgcacactgcattgcacggcgcaatcgaggaggctattgtaacgcgaaaaaggtttgcgtttgtcgaaattga

SEQ ID NO: 1327 - DNA, 2009 bp, Aedes aegypti
tggtgttattaggtgatcagtgtcgtacaagtcggattcttacagattattacaagttcccaccattgctgaaaccgacctttcctcacaatgaagggttggttcgatgcatttcgagacgatggggctcccactctgtactcgttttccaaccgaacgccagtaaccggcgatgtgtcgatcgtggccgtatgcgtcttgtttgccactatctatctggcttttctggtcatctttcccggtgttcgaaagcagaaattcactaccttcacgacagtaacacttagtttattcgtaggattagtcattttagttacccgcctgggatctggttggcatgttgcccagtcaacgattgtcgcaccgtacaaagccttctcacgtgagaagcttccggcccgactcggagcccacattgggctaatgcacatcaacatcacgctggcagcactgccggttggcaattggtccaccccggatattgacttcaacgaacgatttagctggaaccaagctaatgatatgggcaactcgtacaaaaacgcacttcagcgtggcttgccgtatcccattttgaccgtggcggagtatttcagtctgggtcaggaagggttcgcctggggtggacagtatcgagccgctggatactacgctagtattttactatgggcatcattcgcttcgtggttgctgatgaatttgctgttggtggctgtgccacggtatggagcctatactatgacgcttactggcgccctgttgattggggccagcattggttacagccagatgctaccgaaacgaccgttgacgatcttcatcgagggaggccgcatcagttttcgactgggatggtgcttttggcttgtgctgattgcaggcattctctgtttgtcggttggactgataatatcaatcatcgatctggtgtggcctcatcgtttctcaaccattctggaggtttattacgatactccctatgacagacacgtgatattggaagaatctcacgatgtccgataccgtaaacgtaatagcaaagggctagaagatcctccaggccttggatcgcgaatcctacgtcgcctatcgtcgaaaactcgggaccaagcgaatgataaagcaggcatcgagaatcgaggcttccaacatgacgtaccgaagtcaccgtggcgttatccgttccgtcgagctcaacaaacgcctccgcaaggaatccagcgcaccatttcgcaagattcaaactctagcatcgcatccgcagctgccatgtctcaatcgttacataaagttgcactctccagaatgctgccaaaacctcctctggagcgtacccgcgaaatttccaactggtagacgataaacagccatttacattcacccaataacagtcggttcaaaaccgaaagccaatcctcacttaaaactaggaaccacacgtgtgaaactttacgtgatgaatctcttgtgatattaaatcgtaaaacaccgaattgacaaaacagaataacttatcgagataaactgtgcaaaacaaatccaggttattcgtgaaggccttgttcaaatgcgacttatcttaagaataggacgaaacaattttatagattaggacttattgaaaatggcttcgtatggagcagattttaactgaccgtgtctagcgttacagtatagcgatagtagtattctaggaattattcatcaattgcttagaattaagactggccaacttgcatcacacatgagtcgcattcgtcataacagttatcagaaaaaataccattacaagactatcaggagagagaccgagagagtatcatgcccttttaagttatttattaatttgattgtgtagggaattttacgtgtatgtaggttgaattttaattacaaagaaccagtgacagaaacaagaaaaaaaaaaacaaagtattaattaaccatgtgtcatggacagattgtaatcgctatcgaatatagaataaataaaaataattgtcacgaac

SEQ ID NO: 1328 - DNA, 2156 bp, Aedes aegypti
gccggtggcatgatgaagaggtgtaaaagcgcgtgagcaaatgctggtgtacacgcgaaaccaaactttaaatagggcaccgctaccaaagttagtgtgtggcgaaatggatccgcgatcagttggtcaggggttttgccggaggtgaaagataccggactttaaaatggaacgaaacagtaaagtgtatcatgcaacgagaaacttcatgttcaagtatttcctggcgttcacatggatcggattcaactttgtggtgttttgcaaagctttctcccattaccaccatgacccggagtactactatctcagtaagattctaggtaatggcctctgcatatcccgcggtacggcgccggtactcaatttgaccatggccataataacactgcctgtctcacgctcgtttaatgttctcctgaatgctctgttcggtcgatggtctatccgagcgctcgtgttctacttggagaaaattaaagtattgcaccttttcctcggtactgggctgataattgtgggtgttatccatagcatagcacatttcatcaatatcatcaacttcgtggataattacgatgctaagtttgatgccatcaattgggccactggcaaggatgacagtaagttacgcctcctggtggcaacacccacgggattttccggctgcgtgatgctggtaacgctgttcgcaatagcctatttctcgagtcgacagatgcgcgatcggttctacaacagcttcctggcatcgcatcatcttttcctggtgttctacggaatgatgttctaccatccgctcagcaacatcatcaaacatcaaacaaatctgaaggcgcacccgaatggttgcgatattatcgatgaccatgtgttcaggaatgattcagttctgcaggctatttgcagtgaggaaccaaagttcagtgccggagacaaatcgctcgcttcatctgcctcccagcacccagaaagcagccccttcagcgtgatgaagatagtatgtaaaacccaggcgtggatttggccactaatgggactatcgatctacattctcgacataatcattcgatacctcatcgcacactcggacaggcgaaaagtatccactttgcagtcgtacgtcctaccagctaacggagtatatctacgcctgcgatttaccagtagtaagcgcattgtgatatccgcaggccagtacgtcctcttacagtgtccagccatttcgacccttgagtggcacccgtttacagtcgttgacttcccaacagcaatccacaatacggtttcgctaaccgttgcagttaggggcgactggactcaacgattgtatgaccttgtttcggaaaaggaacgtctgaaacagagcggagccggacatgacgctcttgggagactacaatttctgttggacggcccttacccatcggcgatgaccggtatgctgaagtgcaagcgaatagtctacataggagcaggcgtcggtattacaccgtttgcgggctttgtccgccatctgttaaactttaacactgatcgaccttctagaatccacctcatctggattgtgagaaaagctgaaatgttcacctggtttgcagacgagttgaaaaggcttcaagaaaggttttggaagcagaacaaaccagatagatttacgttgaagctgtttctaactcgaaactacaatgtcaatgttatagatgagtattttggagattaccccacgctcaaggcacgcatcaacaaaggccgtccaaattgggatgaagtttttctggatttaacagctttatacgctgggaaatctgtgaccgtgttcagttgtggtcccaaaggtatgaccaaggagcttaaaggcatgtgcagagaataccggaagcatgcgtgcaagtttacgtacttacatgaaggttttggataacaatattaagtgacccaccttggttgacaacatttgaaggaactcaggatatatgaaagtattcttcttgctattccttgctggactatttaataaaccactcaacagaaactgtatcttattattatttattctttcttttcttaggctcgagtgccgtcagatataatggaataaatgtaatttgattttgtttcacaatctacattattttcctatgagggaatggacg

SEQ ID NO: 1329 - DNA, 180 bp, Aedes aegypti
atgaacttcactaagctgttcgcaattgtgctgttggccgctttggtcctgctaggtcaaaccgaagcaggtggcctgaagaagctgggaaagaaattggaaggagccggcaagcgagtattcaaggcttcggaaaaggctctcccggttgttgtaggaataaaagcgattggaaaatga

SEQ ID NO: 1330 - DNA, 180 bp, Artificial Sequence; identical to SEQ ID NO: 1329
  double stranded RNA
